(19) United States
(12) Patent Application Publication
(10) Pub. No.: US 2022/0002667 A1
(43) Pub. Date: Jan. 6, 2022

(54) BACILLUS SP. PROBIOTIC STRAINS AND MUTATIONS

(71) Applicant: DSM IP ASSETS B.V., HEERLEN (NL)

(72) Inventors: Lisa LAPRADE, Kaiseraugst (CH); Ghislain SCHYNS, Kaiseraugst (CH)

(21) Appl. No.: 17/292,683

(22) PCT Filed: Nov. 8, 2019
(86) PCT No.: PCT/EP2019/080630

§ 371 Date: May 10, 2021

Related U.S. Application Data
(60) Provisional application No. 62/758,821, filed on Nov. 12, 2018.

(30) Foreign Application Priority Data
Nov. 14, 2018 (EP) 18206180.4

(51) Int. Cl. C12N 1/20; A23K 10/16

(52) U.S. Cl. CPC C12N 1/205; C12R 2001/125; A23K 10/16

(57) ABSTRACT

The invention involves mutant genes that enable a Bacillus or other bacterial strain, such as Bacillus subtilis or B. licheniformis strain to overproduce acids. These genes can be inserted into a suitable strain and the resulting mutant strain can be used as a probiotic, preferably for use in animal health.

### FIELD OF THE INVENTION

[0001] The invention involves mutant genes that enable a Bacillus or other bacterial strain, such as Bacillus subtilis or B. licheniformis strain to overproduce acids. These genes can be reproduced via mutagenesis, or inserted into a suitable strain and the resulting mutant strain can be used as a probiotic, preferably for use in animal health.

### BACKGROUND OF THE INVENTION

[0002] The use of B. subtilis strains as probiotic ingredient in the feed industry is well known in the art. The function of probiotics (also called “direct-fed microbials” or “DFM”) is to influence the gut microflora in a positive way by supporting the growth of beneficial bacteria and/or the suppression of the growth of pathogenic bacteria. Ideally, by using probiotics, the use of antibiotic growth promotors (AGPs) becomes redundant. It is also desirable for probiotics to fulfill other functions, e.g., helping in the digestion of specific feed ingredients. Thus, there is a need for probiotics which influence the gut microflora in a positive way and fulfill other functions.

### DETAILED DESCRIPTION OF THE INVENTION

[0003] It has been found, in accordance with this invention, that certain mutations which can be induced in a B. subtilis bacteria are beneficial in that various acids can be overproduced, such as acetate. Furthermore, these mutations have been characterized and the mutant portions of the various genes can be inserted into new bacteria, or the mutations can be induced in another Bacillus, such as B. subtilis or B. licheniformis, to improve an existing strain, or to create a new probiotic strain with this beneficial property.

[0004] One embodiment of the present invention is directed to a new strain of Bacillus sp. bacteria which is effective at inhibiting the growth of Clostridium perfringens (one of the major commercially relevant pathogens of poultry), preferably a B. subtilis or a B. licheniformis. It possesses beneficial mutations promoting acetate overproduction.

[0005] In another embodiment, the current invention is directed to a Bacillus subtilis strain and preparations that contain or are derived from this strain. Specifically, the invention is directed to one or more of the following groups:

[0006] The Bacillus sp., preferably a B. subtilis or B. licheniformis strain, of this invention exhibits at least one of the following characterizing sequences:

[0007] a) a 16S rDNA sequence with a sequence identity of at least 95%, and preferably, 100%, to the polynucleotide sequence according to SEQ ID NO:15, designated BMS7 16S;

[0008] b) an alsS sequence with a sequence identity of at least 95%, and preferably, 100%, to the polynucleotide sequence according to SEQ ID NO:2 designated alsS (5.1) or SEQ ID NO:3 designated alsS (5.2);

[0009] c) an adhA sequence with a sequence identity of at least 95%, and preferably, 100%, to the polynucleotide sequence according to SEQ ID NO:9 designated adhA (5.1);

[0010] d) an bdhA sequence with a sequence identity of at least 95%, and preferably, 100%, to the polynucleotide sequence according to SEQ ID NO:7 designated bdhA (5.1);

[0011] e) a dhbA sequence with a sequence identity of at least 95%, and preferably, 100%, to the polynucleotide sequence according to SEQ ID NO:13 designated dhbA (1.6).

[0012] f) a pta sequence with a sequence identity of at least 95%, and preferably, 100%, to the polynucleotide sequence according to SEQ ID NO:5 designated pta (5.1).

[0013] A further embodiment is A Bacillus sp. strain which comprises at least one of the following characterizing sequences:

[0014] a) a 16S rDNA sequence with a sequence identity of at least 95%, and preferably, 100%, to the polynucleotide sequence according to SEQ ID NO:15, designated BMS7 16S;

[0015] b) a adhA sequence with a sequence identity of at least 95%, and preferably, 100%, to the polynucleotide sequence according to SEQ ID NO:9 designated adhA (5.1);

[0016] c) an bdhA sequence with a sequence identity of at least 95%, and preferably, 100%, to the polynucleotide sequence according to SEQ ID NO:7 designated bdhA (5.1);

[0017] d) a dhbA sequence with a sequence identity of at least 95%, and preferably, 100%, to the polynucleotide sequence according to SEQ ID NO:13 designated dhbA (1.6).

[0018] e) a pta sequence with a sequence identity of at least 95%, and preferably, 100%, to the polynucleotide sequence according to SEQ ID NO:5 designated pta (5.1).

[0019] Another embodiment is A Bacillus strain comprising an alsS sequence with a sequence identity of at least 95%, and preferably, 100%, to the polynucleotide sequence according to SEQ ID NO:2 designated alsS (5.1) or SEQ ID NO:3 designated alsS (5.2) and at least a second sequence selected from the group consisting of:

[0020] a) a 16S rDNA sequence with a sequence identity of at least 95%, and preferably, 100%, to the polynucleotide sequence according to SEQ ID NO:15, designated BMS7 16S;

[0021] b) a alsS sequence with a sequence identity of at Least 95%, and preferably, 100%, to the polynucleotide sequence according to SEQ ID NO:2 designated alsS (5.1) or SEQ ID NO:3 designated alsS (5.2);

[0022] c) a adhA sequence with a sequence identity of at least 95%, and preferably, 100%, to the polynucleotide sequence according to SEQ ID NO:9 designated adhA (5.1);

[0023] d) an bdhA sequence with a sequence identity of at least 95%, and preferably, 100%, to the polynucleotide sequence according to SEQ ID NO:7 designated bdhA (5.1);

[0024] e) a dhbA sequence with a sequence identity of at least 95%, and preferably, 100%, to the polynucleotide sequence according to SEQ ID NO:13 designated dhbA (1.6).

[0025] f) a pta sequence with a sequence identity of at least 95%, and preferably, 100%, to the polynucleotide sequence according to SEQ ID NO:5 designated pta (5.1). Yet another embodiment is a Bacillus strain comprising an alsS sequence with a sequence identity of at least 95%, and preferably, 100%, to the polynucleotide sequence according to SEQ ID NO:2 designated alsS (5.1) or SEQ ID NO:3 designated alsS (5.2) and further comprising all the sequences a-f.

[0026] The aforementioned sequences can be inserted into a desired Bacillus strain, or induced in a Bacillus strain, preferably a Bacillus subtilis or B. lichenformis, and more preferably a B. subtilis to create novel strains which have beneficial probiotic activities. In one particularly preferred embodiment, all the sequences above which have a sequence identity of at least 95%, and preferably 100% of SEQUENCE ID NOS 15, 9, 7, 13, 5 and one of either SEQ ID NO 2 or 3 are present in the same bacteria. One such example of this bacteria is designated BMS 7.

[0027] In one embodiment of this invention. The Bacillus sp. strains are further characterized by being able to overproduce acetic acid or acetate. In one embodiment, the strain is a B. subtilis strain wherein said strain is capable of overproducing acetic acid or acetate by at least 40%, 50%, 60%, 70%, 80%, 90%, 100% compared to the wild type strain BMSS. One preferred embodiment is BMS7.

[0028] Another embodiment of this invention is a composition comprising the Bacillus strains of this invention or compounds obtained from the Bacillus of this invention. The composition may be a feed-stuff and further comprises at least one further feed or food ingredient selected from the group consisting of: proteins, carbohydrates, fats, further probiotics, prebiotics, enzymes, vitamins, immune modulators, milk replacers, minerals, amino acids, coccidiostats, acid-based products, medicines, and combinations thereof.

[0029] Without wishing to be bound by any theory, it is thought that the Bacillus sp. strains according to the current invention enhance animal health by a multifaceted mode of action, including the production of antibacterial metabolites with selective efficacy and the competition with pathogenic bacteria by better consuming the available nutrients, thereby suppressing effective establishment of pathogenic bacteria in the gut.

[0030] Probiotics are considered more advantageous than antibiotics because they do not destroy bacteria indiscriminately and do not they lead to antibiotic resistant strains of pathogenic bacteria. Normally, the probiotic bacteria selectively compete with pathogenic bacteria by production of antimicrobial substances with specific efficacy and are ideally able to simultaneously enhance the growth and viability of beneficial gut microflora. Further, they are preferably able to stimulate a systemic immune response in the treated animals.

[0031] The mutant strains of the current invention are preferably mutants of existing strains. The term “mutant strain” used throughout refers to mutants that arise from a wild type Bacillus, such as BMS5 whose genome is given in SEQ ID NO:1, with the intentional use of mutagens such as those known in the art, and preferably EMS. Such mutants may be obtained by classical methods, such as growing the Bacillus subtilis strain in the presence of UV light or in the presence of a certain antibiotic to which the parent is susceptible and testing any resistant mutants for improved biological activity or improved ability to enhance one or more of the indicia of animal health. Other methods for identifying mutants are known to those of ordinary skill in the art. But besides these preferred mutants all other kinds of mutants e.g., mutants obtained by genetic engineering, are also part of the current invention.

[0032] Another embodiment of the current invention is a Bacillus sp. mutant of the strain BMS5 which is not found in nature and has the characteristics mentioned above.

[0033] In a preferred embodiment of the current invention, the strains and preparations of the present invention are administered orally to animals.

[0034] A further subject of the current invention is also the use of a B. subtilis strain and/or a Bacillus licheniformis in the preparation of the current invention as a probiotic ingredient (DFM) in feed products. The Bacillus subtilis or B. licheniformis strains of the current invention and compositions containing them, when administered to animals, preferably enhance the health of such animals and/or improve the general physical condition of such animals and/or improve the feed conversion rate of such animals and/or decrease the mortality rate of such animals and/or increase the survival rates of such animals and/or improve the weight gain of such animals and/or increase the productivity of such animals and/or increase the disease resistance of such animals and/or increase the immune response of such animals and/or establish or maintain a healthy gut microflora in such animals and/or reduce the pathogen shedding through the feces of such animals In particular the strains and compositions of the current invention might be used to assist in re-establishing a healthy balance of the gut microflora after administration of antibiotics for therapeutic purposes. In some preferred embodiments, the animals are poultry.

[0035] A further subject of the current invention is therefore a method of enhancing the health of animals and/or of improving the general physical condition of animals and/or of improving the feed conversion rate of animals and/or of decreasing the mortality rate of animals and/or of increasing the survival rates of animals and/or of improving the weight gain of animals and/or of increasing the productivity of animals and/or of increasing the disease resistance of animals and/or of increasing the immune response of animals and/or of establishing or maintaining a healthy gut microflora in animals and/or of reducing the pathogen shedding through the feces of animals, wherein the strains and/or preparations of the current invention or the compositions of the current invention, which comprise such strain(s), are administered to animals. In some preferred embodiments, the animals are poultry.

[0036] A further subject of the current invention is therefore also the use of strains and/or preparations and/or compositions of the current invention for enhancing the health of animals and/or for improving the general physical condition of animals and/or for improving the feed conversion rate of animals and/or for decreasing the mortality rate of animals and/or for increasing the survival rates of animals and/or for improving the weight gain of animals and/or for increasing the productivity of animals and/or for increasing the disease resistance of animals and/or for increasing the immune response of animals and/or for establishing or maintaining a healthy gut microflora in animals and/or for reducing the pathogen shedding through the feces of animals, wherein the strains and/or preparations of the current invention or the compositions of the current invention, which comprise such strain(s), are administered to animals. In some preferred embodiments, the animals are poultry.

[0037] A further subject of the current invention is therefore also the strains and preparations of the current invention as mentioned before and the compositions of the current invention, containing those strains, for enhancing the health of animals and/or for improving the general physical condition of animals and/or for improving the feed conversion rate of animals and/or for decreasing the mortality rate of animals and/or for increasing the survival rate of animals and/or for improving the weight gain of animals and/or for increasing the productivity of animals and/or for increasing the disease resistance of animals and/or for increasing the immune response of animals and/or for establishing or maintaining a healthy gut microflora in animals and/or for reducing the pathogen shedding through the feces of animals. In some preferred embodiments, the animals are poultry.

[0038] The general procedure for producing bacterial strains of this invention is summarized as follows. Bacterial strains have been mutagenized using ethyl methyl sulfonate (EMS). Different concentrations and times of exposure to the chemical have been tested to ensure a ratio of mutations around 20/cell. To hit successfully a biochemical pathway (like the one for organic acids production that we are targeting), it is important to have more than one mutation, but not too many since this become detrimental to the viability of cells.

[0039] After exposure to the mutagen, cell viability (so called killing rate) and auxotrophy for amino acids are tested. Too many mutations are detrimental for such physiological processes as sporulation (probiotics for ANH are sporeformers and sold as spores), prototrophy (important for fermentation), and maybe probiotic behavior in the gut. All these techniques, their parameters and concerns are known from people skilled in the art.

[0040] Banks of mutagenized Bacillus subtilis BMS5 bacterial cells were then screened on rich medium plates using a pH indicator (bromophenol blue) since the phenotype we were looking for induces acids production/excretion. The indicator we used makes cells producing acids turning yellow. A large number of phenotypically yellow colonies were collected based on the intensity of the yellow color and the timing of appearance of the yellow color. Positively yellow colonies were restreaked for isolation on identical medium. Yellow mutants at that point were then cultured in liquid medium to be tested by HPLC for the organic acids they were producing. Lactic, butyric, acetic and propionic acids production were evaluated for around 30 colonies on liquid chromotography. Two colonies were identified as strong acetic acid producers. They were named BMS5-1 and BMS-2. Both isolates were then evaluated for their ability to sporulate, which is a critical parameter for process (fermentation). One of the strain (BMS5-2) was observed not to sporulate as efficiently as the other. Its use was discontinued since it would need to be produced at much higher volume to yield the same number of spores.

[0041] BMS5-1 (now designated as BMS7) was then cultured to extract chromosomal DNA for genome sequencing. Genome sequencing was performed using Illumina technology.

[0042] Genome mutations were then identified between 13MS7 and its parental strain BMS5. The genes harboring mutations linked to acetate production pathway are listed in the examples.

[0043] Resistance to antibiotics of BMS7 and BMS5 (parental strain) were then assessed to be sure that no mutation was increasing resistance to the 10 antibiotics listed by EFSA for Bacillus strains.

[0044] The following non-limiting Examples are presented to further illustrate the invention.

### EXAMPLES

[0045] Bacterial growth conditions

[0046] Bacillus strains were grown on minimal medium (MM; 1 X Spizizen salts, 0.04% sodium glutamate, and 0.5% glucose) or veal infusion-yeast extract complete medium (VY) or grown on agar plates consisting of tryptose blood agar base (TBAB, Difco, Md.).

[0047] Growth was performed at 37° C.

[0048] Isolation of EMS-induced acids-producing mutants

[0049] Banks of ethyl methylsulfonate (EMS; d=1.21 g/ml solution) were prepared and screened. Logarithmic-stage BMS5 cells were treated with 460 mM EMS for 60 min, and aliquots were frozen in 10% glycerol at −80° C. The killing rate was determined by plating serial dilutions of cells treated with EMS vs cells with no treatment but the same procedure on TBAB plates and comparing CFUs. Cells from the frozen stock were diluted 1:5 in VY medium, incubated at 37° C. for 60 min and plated onto TBAB medium containing 2% glucose and bromocresol purple as pH indicator. This pH indicator is purple above pH 6.8 and yellow below pH 5.2 (pKₐ=6.3). Phenotypically diverse yellow colonies were collected along 24 hours at 37° C. Yellow colonies were re-streaked for isolation on similar medium and cultured in liquid medium VY with and without glucose before characterization of organic acid profile on HPLC. Prior to organic acid screening, spore forming ability was assessed by 30 min exposure to 90° C. prior to plating on TBAB in comparison to non-heated cells.

[0050] Characterization of organic acids profile Lactic, propionic, butyric and acetic acids were quantified. Method for acid quantitation uses and HPLC (high pressure liquid chromatograph) system with UV (ultra-violet) and RI (refractive index) detection. Majority of quantitation is conducted using RI, unless there is a co-elution detected, where UV at 210nm will be used. Column is a BioRad Aminex HPX-87H 300×7.8mm with HPX-87H guard column. Solvent is 0.05% Trifluoroacetic Acid in 100% filtered Di-water; isocratic flow rate of U.5ml/min. Column Temp is 50C, RI temp is 35C. Injection volume is 10 μl.

[0051] Identification of genomic mutations Bacterial cells were grown overnight at 37° C. in veal infusion-yeast liquid medium for genomic DNA preparation by MasterPure Complete DNA purification kit. Sequencing was performed on Illumina Mi-Seq technology platform. Genome assembly was made using MIRA platform. Identification of single base mutation was made by comparison to parental strain genomic sequence.

### Example 2

### Sequences

[0052] Reference is made to the following sequences:

[0053] Genome: the genome of wild type BMS5 is SEQ.ID.NO.: 1. Due to its length, it is not reproduced in print.

alsS (5.1)
SEQ. ID. NO.: 2
vlakatnelktsgknrgaelwdclveqgvthvfgipgakidavfdalkdkgpelvIcrheqnaafmaaavgrltgkpgvclvtsg
pgasnlatglltantegdpwalagnviradrlkrthqsldnaalfqpitkysvevqetgnipeavtnafKaasaggagaafvsfp
qdwneitnykrwrsvpapkqgpapeeaysaaiakiqtaktpvtivgmkggrpeavkqirkllaktklpfvetyqgagtlsreled
qyfgriglfrnqpgdllleqadwltigydpieydpkfwnvngdraiihldeiqadidhayqpelellgdiaatvkqiehdavtfd
mgsreqevlselkqmltdsekapsdhksdrvhplqivqelrnaidddvtvtcdigshaiwmsryfrayeplkllisngmqtlgva
lpwaiaativnpgekvvsysgdggflfsameletavrtkapivhlvwndstydmvafqqmkkynrtscvdfgnidivkyaesfga
tglrvespeqtadvlqkglntegpviidipvdysdnvhIssdmtpkqfkekmkakal*
alsS (5.2) from B. licheniformis
SEQ. ID. NO.: 3
vlakatnelktsgknrgaelwdclveqgvthvfgipgakidavfdalkdkgpelvIcrheqnaafmaaavgrltgkpgvclvtsg
pgasnlatglltantegdpwalagnviradrIkrthqsldnaalfqpitkysvevqetgnipeavtnafraasaggagaafvsfp
qdwneitnykrwrsvpapkqgpapeeaysaaiakiqtaktpvtivgmkggrpeavkqirkllaktklpfvetyqgagtlsreled
qyfgriglfrnqpgdllleqadvvItigydpieydpkfwnvngdraiihldeiqadidhayqpelellgdiaatvkqiehdavtf
dmgsreqevlselkqmltdsekapsdhksdrvhplqivqelrnaidddvtvtcdigshaiwmsryfrayeplkllisngmqtlgv
alpwaiaativnpgekvvFvsgdggflfsameletavrtkapivhlvwndstydmvafqqmkkynrtscvdfgnidivkyaesfg
atglrvespeqtadvlqkglntegpviidipvdysdnvhIssdmtpkqfkekmkakal*
alsS (BMS5) (wildtype)
SEQ. ID. NO.: 4
vlakatnelktsgknrgaelwdclveqgvthvfgipgakidavfdalkdkgpelvlcrheqnaafmaaavgrltgkpgvclvtsg
pgasnlatglltantegdpwalagnviradrlkrthqsldnaalfqpitkysvevqetgnipeavtnafraasaggagaafvsfp
qdvvneitnvknvrsvpapkqgpapeeavsaaiakiqtakipvllvgmkggrpeavkqirkllaktklpfvetyqgagtlsrele
dqyfgriglfrnqpgdllleqadvvltigydpieydpkfwnvngdraiihldeiqadidhayqpelellgdiaatvkqiehdavt
fdmgsreqevlselkqmltdsekapsdhksdrvhplqivqelrnaidddvtvtcdigshaiwmsryfrayeplkllisngmqtlg
valpwaiaatlvnpgekvvsysgdggflfsameletavrtkapivhlvwndstydmvafqqmkkynrtscvdfgnidivkyaesf
gatglrvespeqtadvlqkglntegpviidipvdysdnvhlssdmtpkqfkekmkakal*
pta (5.1)
SEQ. ID. NO.: 5
vadlftkvqekvagkdvkivfpeglderilvavnnlagnkvlkpivvgnkediqakakelnitldgvdifdphtyegmeelvqaf
verrkgkateeqarkalldenyfgtmlvykgladglvsgaahstadtvrpalqiiktkegykktsgvfimargdeqyvfadcain
iapdsqdlaeiaiesantaqmfdidSrvamlsfstkgsaksdetdkvaeavkiakekapeltldgefqfdaafvpsvaekkapds
dikgdanvfvfpsleagnigykiaqrlggfeavgpilqglnmpvndlsrgcnaedvyntalitaaqal*
pta (BMS5) (wildtype)
SEQ. ID. NO.: 6
vadlftkvqekvagkdvkivfpeglderilvavnnlagnkvIkpivvgnkediqakakelnitldgvdifdphtyegmeelvqaf
verrkgkateeqarkalldenyfgtmlvykgladglvsgaahstadtvrpalqiiktkegykktsgvfimargdeqyvfadcain
iapdsqdlaeiaiesantaqmfdidprvamlsfstkgsaksdetdkvaeavkiakekapettldgefqfdaafvpsvaekkapds
dikgdanvfvfpsleagnigykiaqrlggfeavgpilqglnmpvndlsrgcnaedvyntalitaaqal*
bdhA (5.1)
SEQ. ID. NO.: 7
mkaarwhnqkdirienidepkaepgkvkikvkwcgicgsdlheylggpifipvgkphpltnemapvtmghefsgewevgegvkny
svgdrvvvepifathghqRaynldeqmgflglagggggfseyvsvdeellfklpeelsyeqgalvepsavalyavrqsklkagdk
aavfgcgpigllviealkaagatdiyavelsperqekakelgaiiidpsktddvveeiakrtnggvdvsyevtgvpwlrqaiqst
niagetvivsiwekgaeihpndivikertvkgiigyrdifpwlalmkegyfsadklvtkkivlddlieegfgalikeknqvkilv
kpn*
bdhA (BMS5) (wildtype)
SEQ. ID. NO.: 8
mkaarwhnqkdirienidepkaepgkvkikvkwcgicgsdlheylggpifipvgkphpltnemapvtmghefsgevvevgegvkn
ysvgdrvvvepifathghqgaynldeqmgflglagggggfseyvsvdeellfklpeelsyeqgalvepsavalyavrqsklkagd
kaavfgcgpigllviealkaagatdiyavelsperqekakelgaiiidpsktddvveeiakrtnggvdvsyevtgvpvvlrqaiq
stniagetvivsiwekgaeihpndivikertvkgiigyrdifpsvlalmkegyfsadklvtkkivlddlieegfgalikeknqvk
ilvkpn*
adhA (5.1)
SEQ. ID. NO.: 9
mcnnhptrvlsaphakakferttierralrphdilidikysgichsdihsafdewgggifpmvpgheiagvveavgeevttfavg
drvgvgcfvdscgeceyclngdeqyctkgvvqtynnldydgnptyggysqkivvtdrfvvripdqleldaaspllcagittyspl
khwnagpgkkvaivgmgglghlavqfahalgaevtvlsrsmnkkdealefgadhyfatsdpdtftelagrfdlitntvsantdvd
aylstlridgtlvnvgapakpdsysvfslitgrrsiaSslvggipqtqemldfaaehgiapkievipanqvdeayervlqsdvry
rfvidistl*
adhA (BMS5) (wildtype)
SEQ. ID. NO.: 10
mcnnhptrvlsaphakakferttierralrphdilidikysgichsdihsafdewgggifpmvpgheiagvveavgeevttfavg
drvgvgcfvdscgeceyclngdeqyctkgvvqtynnldydgnptyggysqkivvtdrfvvripdqleldaaspllcagittyspl
khwnagpgkkvaivgmgglghlavqfahalgaevtvlsrsmnkkdealefgadhyfatsdpdtftelagrfdlitntvsantdvd
aylstlridgtlvnvgapakpdsysvfslitgrrsiagstvggipqtqemldfaaehgiapkievipanqvdeayervlqsdvry
rfvidistl*
alsS (1.6)
SEQ. ID. NO.: 11
lnnvaaknetltvrgaelvvdsliqqgvthvfgipgakidavfdvlkdkgpelivcrheqnaafmaaavgrltgkpgvclvtsgp
gasnlatglvtantegdpwalagavkradrlkkthqsmdnaalf*
alsS (B. licheniformis BMS1) (wildtype)
SEQ. ID. NO.: 12
lnnvaaknetltvrgaelwdsliqqgvthvfgipgakidavfdvlkdkgpelivcrheqnaafmaaavgrltgkpgvclvtsgpg
asnlatglvtantegdpvvalagavkradrlkkthqsmdnaalfqPITKYSAEVEDANNIPEAVTNAFRAAASGQAGAAFLSFPQ
DVTAGPATAKPVKIMPAPKLGAASDEQISAAIAKIHNANLPVVLVGMKGGRPEAlEAVRRLLRKVKLPFVETYQAAGTLSHDLED
QYFGRIGLFRNQPGDMLLEKADVVLTVGYDPIEYDPVFWNGKGERSVIHLDEIQADIDHDYQPEIELIGDIAETLNHIEHDSLPV
SIDESFAPVLDYLKKALEEQSEPPKETKIDLVHPLQIVRDLRELLSDDITVTCDIGSHAIWMSRYFRTYRPHGLLISNGMQTLGV
ALPWAIAATLVNPGQKVVSVSGDGGFLFSAMELETAVRLKAPIVHIVWNDSTYDMVAFQQEMKYKRTSGVDFGGIDIVKYAESFG
AKGLRVNSPDELAEVLKAGLDAEGPVVIDIPVDYSDNIHLADQRFPKKFEEHFNKEASKQS*
dhbA (1.6)
SEQ. ID. NO.: 13
vkgkvalvtgasqgigkevalalagrgvfvaaadqnrkglleledeleqkglqgsgfaadMgdsaavdqliadiereigpidmlv
nvagvlrtglihstsdedwektfnvnstgvfnvsravarrmvprrtgaivtvgsnaaavprmhmaayaaskaaalmftkclglel
aeynircniispgstdtpmqrslwqceeaaqgviegsletfktgiplgklaspadiadavvfllsdgarhitmhdlrvdggatlg
a*
dhbA (B.licheniformis BMS1) (wildtype)
SEQ. ID. NO.: 14
vkgkvalvtgasqgigkevalalagrgvfvaaadqnrkglleledeleqkglqgsgfaadvgdsaavdqliadiereigpidmlv
nvagvlrtglihstsdedwektfnvnstgvfnvsravarrmvprrtgaivtvgsnaaavprmhmaayaaskaaalmftkclglel
aeynircniispgstdtpmqrslwqceeaaqgviegsletfktgiplgklaspadiadavvfllsdgarhitmhd
BMS7 16S sequence
SEQ. ID. NO.: 15
GTCAGTCAAACTACTTTATCGGAGAGTTTGATCCTGGCTCAGGACGAACGCTGGCGGCGTGCCTAATACATGCAAGTCGAGCGGA
CAGATGGGAGCTTGCTCCCTGATGTTAGCGGCGGACGGGTGAGTAACACGTGGGTAACCTGCCTGTAAGACTGGGATAACTCCGG
GAAACCGGGGCTAATACCGGATGGTTGTYTGAACCGCATGGTTCAGACATAAAAGGTGGCTTCGGCTACCACTTACAGATGGACC
CGCGGCGCATTAGCTAGTTGGTGAGGTAACGGCTCACCAAGGCGACGATGCGTAGCCGACCTGAGAGGGTGATCGGCCACACTGG
GACTGAGACACGGCCCAGACTCCTACGGGAGGCAGCAGTAGGGAATCTTCCGCAATGGACGAAAGTCTGACGGAGCAACGCCGCG
TGAGTGATGAAGGTTTTCGGATCGTAAAGCTCTGTTGTTAGGGAAGAACAAGTGCCGTTCAAATAGGGCGGCACCTTGACGGTAC
CTAACCAGAAAGCCACGGCTAACTACGTGCCAGCAGCCGCGGTAATACGKAGGTGGCAAGCGTTGTCCGGAATTATTGGGCGTAA
AGGGCTCGCAGGCGGTTTCTTAAGKCTGATGTGAAAGCCCCCGGCTCAACCGGGGAGGGTCATTGGAAACTGGGGAACTTGAGTG
CAGAAGAGGAGAGTGGAATTCCACGTGTAGCGGKGAAATGCGTAGAGATGTGGAGGAACACCAGTGGCGAAGGCGACTCTCTGGT
CTGTAACTGACGCTGAGGAGCGAAAGCGTGGGGAGCGAACAGGATTAGATACCCTGGTAGTCCACGCCGTAAACGATGAGTGCTA
AGTGTTAGGGGGTTTCCGCCCCTTAGTGCTGCAGCTAACGCATTAAGCACTCCGCCTGGGGAGTACGGTCGCAAGACTGAAACTC
AAAGGAATTGACGGGGGCCCGCMCAAGCGGTGGAGCATGTGGTTTAATTCGAAGCAACGCGAAGAACCTTACCAGGTCTTGACAT
CCTCTGACAATCCTAGAGATAGGACGTCCCCTTCGGGGGCAGAGTGACAGGTGGKGCATGGTTGTCGTCAGCTCGTGTCGTGAGA
TGTTGGGTTAAGTCCCGCAACGAGCGCAACCCTTGATCTTAGTTGCCAGCATTCAGTTGGGCACTCTAAGGTGACTGCCGGTGAC
AAACCGGAGGAAGGTGGGGATGACGTCAAATCATCATGCCCCTTATGACCTGGGCTACACACGTGCTACAATGGACAGAACAAAG
GGCAGCGAAACCGCGAGGTTAAGCCAATCCCACAAATCTGTTCTCAGTTCGGATCGCAGTCTGCAACTCGACTGCGTGAAGCTGG
AATCGCTAGTAATCGCGGATCAGCATGCCGCGGTGAATACGTTCCCGGGCCTTGTACACACCGCCCGTCACACCACGAGAGTTTG
TAACACCCGAAGTCGGTGAGGTAACCTTTTAGGAGCCAGCCGCCGAAGGTGGGACAGATGATTGGGGTGAAGTCGTAACAAGGTA
GCCGTATCGGAAGGKGCGGCTGGATCACCTCCTTTCTAAGGATTT

1. A Bacillus sp. strain which comprises at least one of the following characterizing sequences:
a) a 16S rDNA sequence with a sequence identity of at least 95%, and preferably, 100%, to the polynucleotide sequence according to SEQ ID NO:15, designated BMS7 16S;
b) a adhA sequence with a sequence identity of at least 95%, and preferably, 100%, to the polynucleotide sequence according to SEQ ID NO:9 designated adhA (5.1);
c) an bdhA sequence with a sequence identity of at least 95%, and preferably, 100%, to the polynucleotide sequence according to SEQ ID NO:7 designated bdhA (5.1);
d) a dhbA sequence with a sequence identity of at least 95%, and preferably, 100%, to the polynucleotide sequence according to SEQ ID NO:13 designated dhbA (1.6).
e) a pta sequence with a sequence identity of at least 95%, and preferably, 100%, to the polynucleotide sequence according to SEQ ID NO:5 designated pta (5.1).

2. The Bacillus strain according to claim 1 which is selected from the group of Bacillus subtilis and Bacillus licheniformis.

3. The Bacillus strain according to claim 1, wherein said strain is capable of overproducing acetic acid or acetate.

4. The Bacillus strain according to any of claim 1 selected from the group consisting of:
a) B. subtilis BMS 7;
b) a mutant of B. subtilis BMS 5, wherein said mutant comprises a DNA sequence identity to BMS 5 of at least 95%.

5. The Bacillus strain of any of claim 1 wherein said strain is capable of overproducing acetic acid or acetate by at least 40%, 50%, 60%, 70%, 80%, 90%, 100% compared to the wild type strain BMS 5.

6. The Bacillus strain of claim 1, wherein said strain inhibits the growth of C. prefringens bacteria.

7. A composition comprising the Bacillus strain or compounds obtained from the Bacillus strain of claim 1.

8. The composition of claim 7, wherein said composition is a feed-stuff and further comprises at least one further feed or food ingredient selected from the group consisting of: proteins, carbohydrates, fats, further probiotics, prebiotics, enzymes, vitamins, immune modulators, milk replacers, minerals, amino acids, coccidiostats, acid-based products, medicines, and combinations thereof.

9. A method of providing nutrients to an animal, inhibiting the growth of pathogenic bacteria or providing a healthier environment, comprising administering or applying the composition of claim 8.

10. The method of claim 9, wherein said method comprises feeding said composition to animals as a feedstuff in an amount sufficient to: improve the feed conversion rate of the animals; decrease the mortality rate of the animals; increase the survival rates of the animals; increase weight gain of the animals; increase the disease resistance of the animals;
increase the immune response of the animals; establish or maintain a healthy gut microflora in the animals; and/or reduce pathogen shedding through the feces of the animals.

11. A Bacillus strain according to claim 1, comprising an alsS sequence with a sequence identity of at least 95%, and preferably, 100%, to the polynucleotide sequence according to SEQ ID NO:2 designated alsS (5.1) or SEQ ID NO:3 designated alsS (5.2) and at least a second sequence selected from the group consisting of:
a) a 16S rDNA sequence with a sequence identity of at least 95%, and preferably, 100%, to the polynucleotide sequence according to SEQ ID NO:15, designated BMS7 16S;
b) a alsS sequence with a sequence identity of at least 95%, and preferably, 100%, to the polynucleotide sequence according to SEQ ID NO:2 designated alsS (5.1) or SEQ ID NO:3 designated alsS (5.2);
c) a adhA sequence with a sequence identity of at least 95%, and preferably, 100%, to the polynucleotide sequence according to SEQ ID NO:9 designated adhA (5.1);
d) an bdhA sequence with a sequence identity of at least 95%, and preferably, 100%, to the polynucleotide sequence according to SEQ ID NO:7 designated bdhA (5.1);
e) a dhbA sequence with a sequence identity of at least 95%, and preferably, 100%, to the polynucleotide sequence according to SEQ ID NO:13 designated dhbA (1.6).
f) a pta sequence with a sequence identity of at least 95%, and preferably, 100%, to the polynucleotide sequence according to SEQ ID NO:5 designated pta (5.1).

12. A Bacillus according to claim 11 comprising all the sequences a-f.

The application's sequence listing, which the Patent Office published only in electronic form, follows.

SEQUENCE LISTING (15 sequences)

SEQ ID NO: 1 - DNA, 4118210 bp, Bacillus subtilis (residues 1-2,059,105 of 4,118,210)
attaggcacgccgccagcgttcgtcctgagccaggatcaaactctccgataaagtagtttgactgactacgcacatcgctgtgcgatttatttaaaactttgaattaacaggtacgttttgtcttgtttagttttcaaagatcattaccgcttgttgaagcagctttattatcttaccactcagcttcttttatgtcaacaacttttttcaagttgtttccgaagcttttcgttgttgtctgctgttcatcagcgacgtttaataatataacacccttttgaaaatatgacaatagtttttttaaaaaaatcattaattattttctttcatacttatttcagtttctcttctatagaaagataagctgtcttgtggtttggcatattttcttgtatagtaagattgaactaaatacttgatgaccacaaggggagcattaaagctgagagtgaacgttttgttctgaccctttgaacctgttagttaacgctggcgtagggatgtggcaaagccaaatgatttgcagtttatgcaagcagcgcgcggaccttttcccatccttccccgcgctgcttttttgtttatccttgttacggttgtctgaccagggggaaaactatgaatcattcaacacggcttgtgcgcttaattgaaatagcgattatgaccggggcggctgtcattctggacattgtctcaggtatgtttctccggatgccccaaggcggttcggtctctattatgatgattccgatttttttgatttcattccgctggggagtgaaagccgggcttacgacaggctttttgacagggattgtccagatcgccatcggcaatttgtttttgcagcacccggtgcagctatttcttgattacatcgcggcatttgcagtcctcggtttcagcggcttgtttgcttccggtgtacgggaatcggcattgaataaaaaaagaggcgctttaacgatgtatgttataggcggtgttttcatcggcagtgtgctgcgctatgcggcacatgtggtctccggagctgtctttttcggaagctatgctccgaagggcacgccggtctggatttattcgtccgtctataacgcgacttatatgattccttcttttatcctttcggccattgtccttatcttattattcatgactgcgccgcggcttcttgaagctaagcggacgaactgaaacagcaggcggtttacgcctgctgtttttttattccgggctgtgccgttcgtttgaatcactcagttcttttgtaagttcatttatactttgttttatgtttcctttacctgaaaaattctcaataagctcttttacattgattccggaagatgcttttaagctttcctgaagaccggccattaaattggttgcgtagcctgtgactttattggccccgctgttttcaccgcttcctcccgtatcaacgacggttattttatcaatgttggaaagaggcgctgagacttgcttcgcatattcaggcagcattttcacaatcatatcaaggattgcagcctgcccgtatttttcgaatgcttcggcgattttttctttagcttccgcttctgcgagtcctttcaggcggatgacttccgcttcggtttctcctctcgccttttcagcctccgctttagcaagaccgtcaattctcacgcgttccgcttccgccttggccatcgcttcgatgctgtactgctcggcatccgcttctgcgagctgcttcgcttttgcggctgcagccgcttgttccaccgagtaacggtcggcatcggcttttttcttcacttcagagtcatattggcgctcacggcgcagaatttctttttcctccaattcaatctgcttttgccgctcaataattttaatttgcatttcctgctctgtcacctgctggcgggcttttgctgtttcaagatcatatgcctggtcggcattggcttttgctgtatcctgctctcttctgtattccgccattttcagctgattgattttttccgcttcagctatttccgtcgcccgctccagctctgatttttttgcgtctttatcagcggccgcacgtttaatcctcgtctctttatccgcttctgccgtggcaatgtccgcatcccgcttgacttgggcgattctcggcttacctaatgattcaagatagccgtttttatcgcggacgtctttaatcgtaaaagaaacgatcacgagccccattttagcaagatcctgagacgcgacccgctggacttcctgagaaaacttttccctgtttttataaatctcttcaacggtcatggagccgaggatggagcgcagatggccttccagcacctcccgcgcctcctgctcacggtcgtccttagatttccccaaaaattgttcagctgctgtggcgatttcaccgatggagcctccgattttaataatggcggttccgtcggccattaccggcacgccttgctctgtatagacttcgggtgtagagacatcaagtttgcttgacagtaaactgagaggttctgcctgctggaataccgggagcacgaacgttcccccgccccggacgattttcagacgatttccgccttcatcaatgtggacgttcttatttcccaaataacttccggtcacgataagggcttcgtccggccccgctgtccggtacttcgtaataaatacagcaataagtgcgatgagtaaaaagaatacgattccgataacgatgataatcggcatagtcataacagttcccccttagatatcagattggttcatgcggcgtcacaaaaagcactccgtctttcacgtcaatcactaatacggcagttccgtacttgatctgttcttgatcaaagctgacggctgatttagaaatggcgccccctattccctctatgatcacttctccatagccgtctttcgggacggaagtaatgaccctgccgactctgccctttaaatccgtctcccgataagcgagcgattcttccgctgatgaaagcgggacaaggacgaagaagtgaagcaggctgaccaaaagaaccgaaagaacaaatgaaagcaacgcaatgacagaacttgatagcggagcggcgatttcgccgatataacctgaggctgaaaagattgttaaaaaagacagaatcaatgcagggtttaaaaatgaaacaggaatggcttccgagaggccgtgaaacacatcttgaaaaaacagaatcaaaagcgtgagacttcccgaaataatcaatgtgtaaagatagaccgtttcaagcggcagatgaaatatgtccatcttctatcctcctttcggccgaggtgtcggagtgttactttatatacggatgtaaaggtaaatggtttcaattttctgataaggaaggctgattacatgattatccaatccggatatgatatgtttactctaaaggaggagataggatgagcatttttaatgaagccagacagcagatctgggaagaactgaaaggactctctgatgaggaattcaaccgaaagcccgcggctgatgagtggagcgtgcgggaagtccttgaccatttaaagaaaattgacgaaacagcgcagacccttttatcaaagcaggcaaaagacgcaccgttaaaagaaatagaagaaaaaccgatggagtttatagaggacagaacagataaacggccggcgccgtcacacctcgaacctgagcaaaaccgattatcagtcattgaagcaaaacaagaattagatacggcaagacagcagctgaccgcagttatttcatcattaaacgaggaagactttgaacgtgtgcttccgcatcctgtttttcaagaactgacgatccgccagtggattgattttatcggccatcatgaaaagcgtcacattaatcaaataaaagaaatcaaacaaaaaatcgaaaaggtctagtcagaccttctcgatttttttcttggcgcgtttcggttcataagaatggatggtgaccgcatcgcccgtgcatatgtcacccgggcgttcaacaatacagacaattcctcttctgcccatcgcgtgcctcacaaacgccgcggcgagttttggctgatccggataaaaggattgaaagacttctcccggctgaatgcacggatcattttctccctcgcacaacagagacgcaccgctcggaaatatcattctgcttccttctttaagcggcgtcagtgcagaaaaaccgctgattgcgatgttagcgccgagccattcgggaaagatatgagaaatccccatcttctccgcaatgtcatcacattcctccatggacacgattgaaatctgtctccggttaaaaatttctgttcctctttcatacatcggctcacgcgcgccggccttttttgtcagtccgaaatgcaggtcaccgggaaacccgccgtattccgcacgaagcttgtccatctttttggtaacaaattgttcggtatccgctatatatacgccttccgtctttgctgttatgcgtttccacatcagccaccaccgcctttttcttgacattatccttaaaaaaccccgctctgtaaaggagcggggttcatttattataccgttttcggcgttaagtcaaagcagcgtttgtaaatccagttgtatgctttctcattcaaatctcttggattcccgaaagtttgcggatctttcatggcttcttttgataaacgttcaatcatgtccggagacacaccttgttcttctaaactcggcacctctaaatcttttacaagatcatacatccagttgacggacgcttttgccgcttcttcggttgtcatgttgcttgtatcgattccgaatgctttggcgatgcgggcgaatttttccggatagcctttccagttgtattccattaccggccccatcatagctgcgacgcattgtccgtgagcgacagggatgatgccgccgagcgtctggctcatcgcatgcgccgcgcctgctgattcactgccgtatgaaaggccggcaagcatcgccgcctgcgccatgccgtatcttgcttccaaatcctctccgtccgcaaacgagcgcttaatataatgcgccgcatattcaatggccattaaagcgacggcatcagtgatcggctgggcgaatttcatcgtatagcactcgatggcgtgcgcaagtgcgtcaatacctgtcatggccgtcacatgcggaggcatggacgtgtgcagctcagggtcaatgaccgttaaatgcgcggcgataagcggtccgcccgtattgaatttaaattctctttcttcatctgtaatgaccgcccattgtgtgacctctgaacctgttcccgcagtcgtcgggatcgttgtcagcggaggaatacggttttccagcggctttttgccttccgcggcttcataatcaagcacacttccttcgtgtgtcgcttctaccccgatcgctttcgctgtatccatggagcttccgccgccgacagccacaaggccgttgcagttttcttttttatacagttctgatccttcgtttacaagacgtacaggcgggttcggctccactttgttaaacaggacgacttcgatgcccgcttcctgcaaagattcaatgaccgggtttgccactcccgcgttataaattcccgggtctgttacgagcagcgcttttgtgacgccaagcgctctgacttcacttcccgcgtgctgaatcgcgccgattccgtgtttaatgactgtcgggatttcgaatgtatggaatttatgcatgctttctactttcatatttaatgtcatattgtatctcctcctcgttatgcttgaaaccagttcacagccgcaggtttcgtgttgcggtaaatatgtttgatttccgtgtattcttccagaccgattttgccgagttcgcggccgaagcccgattgtttgtacccgccccatggcgcttgcgcgaaatacgggtggaaatcattgatccataccgttcccatccgcagtttggcggctacgcgttcgcatttttcaatatcctttgaccataccgctccggccagcccgtaaatggtatcgttggcaagtctgatcacttcttcttcagaagaaaatgactcaactgttaaaacggggccgaagatctcctcttggactatccgcatatcagacttgcagtttgagaaaatagtaggttcatagaagaaaccgttttgaagggcgggatcatcaggacgtttgccgcctgtttccagttttgccccttcttcgatgccgatttctacgtatttttcgactttggcccgatgctcggcggaaatcagcggaccgctttccgtatcttcatgaaaaccgtttcctaatttgatgcgtttcgtgcgcttgatcagctcggctaaaaattcatcatgaatggcttcgtccaccaaaagacgtgaccctgccgaacaaacttggccggcatggaaaaacacggcgttcagcgcttgatctgcagctgtttcgagatctgcatcttgaaatacgatattcggatttttgccgccaagctccagggcaatctttttcacattgccgcttgccgcctgcatgatttttttgcctgtttcaattccgcccgtaaaagagaccagatcgacgtcgaggtttctcgccagctcgtcgccgacagaggcgcccggccccagcacgagattggcgacccctttcggaataccggcttcttctattaattgaaagactttaatggttgtcagcggagtaatctcgctcggctttaaaacgatcgtgtttccggccgcaagagcgggagcgattttccagctcgcctgaaggagcggatagttccacggcgtaatttgtccgcatacgccaatgggctctctgacgattttacttacggaatcgggaatcggagatgaaatgacctcgcctccgtctttatccgccaaaccggcataatattgaaatacatttgcgatatcatccatatcggctttactttcttcaatcgtttttcctgtatcgagcgattccagctcagctaattcgttcagatcgcgtctgattaattccgcaattttcagaacaaattgtccgcgctcgagcccggaaagcaccggccactccccttcatcaaatgcttttctggctgcggcgatggctttcaccgcatcgttccgatctccttcgcataccgttgcaatttcttcttgattaaatggattaatgatacggcgggtctgttttttttctgcactgatccattcgccgccgatataaagcgttttgctcataagagtcctccttaccgaaaagtaagtttgttaaataaaaatttaatgtttttaacaatattaatttaacatatgtttttttgcctgtcaaaacccggtcagtccgtttagattttgacattttgtcatgattcgttaagattaagaacataaagaaatgacttaacaaatttaaacttcaagaggaaaagagggacagtatggatgagaatccagaattcgcagctatagaacaagccagggaccttgtcattgattccattgcagagacgatggatctttacggaatcacccggagtgtcgggattttatacggaacaatgtatatgagggatgaaatgacgcttgacgaaatgcgtgaggaactgcagatgagcaaaccgagtatgagcacaggcgtcaaaaagctgcaggatttaaatgtggtcaaaaaaacctttcaccgcggcacacggaagcatacgtttgtagcggaaaaagatttctttacgtttttcacgaatttcttcccgccgaaatgggatcgtgaagttcaggtgaatttgtccgccatcgaacaggcccaggcggatttgcagtccgttttgctggccgaggaaggcaacgcggaattacaggaagaagcgcggcagttatatgatcagcttgaaagttcgaaagcttattatcattggctgaagcggctcgccgactcggttcagagcggggagatttttaaatttatcccgatagaaacggacgaaaaaaacgcctgaatcaaaatcaggcgttttttgtcgtgatttgattatttttgagaaaatataggaacataaccccatttacttccattaaaattgatggtaaatttttataggtatggtcgttcttttttaagaacaatcaacaaatttttttttagggggatttatgaaaatgaaacagaaatttttctcaactgtcatggcaagtttattcggcctggttttgcttctttctctgccgacagcgtcattcgccgctgagtcaggctcaaccgttcacgagccggaaatgtccacgaaagcgactgctaccttatttgcaaaatatacaggtgccagccagcaggaatggtcattttctgatatcgaattgacgtaccgtccgaacacgatcctgagcttaggcgttatggaatttacccttcctagcggatttgcggctacaacaaaagatacagtcaacggacacgctttgcgtgaaagacagattctgaataacggcaaaacagtcagacttccgttaaacattgatttgctcggcgcagcggaattcaagctttctcttaataataaaacattgcctgctgcaggtacatataagttccgtgcagaaaataaatcattaagcatcggctctaaattctatgctgaggacacaattgttgttcaaaaacgcagcacaccgccgacacagccttgcaactgcaaataattgcgaaaaacggaccggcacaagcccatcgcttgtcagccggtctttttttgtgctgttttctttcttccggctctcgcattgacaaacccttgaaacaggagtacattcttgtttgttgtatttggagtgacgaaaacagtttcttaaggagttatgaggattgggaaaaatcaaaaataaacaatttgccgtcatcggactcggccgtttcggcggaagcatctgtaaagagctttttaaaatggggcatgaggtgcttgcggtcgatatcagcgaagagcgggtcaacgcatactcctcttatgccacgcatgctgtgcgggcaaattcaacggaagaaagcgagcttcagtcgctcggcatcagaaattttgaatatgtcatcgtagcaatcggcgccaacattcaggcaagcacgctgacgacgctgttattgaaggagctgaacatccccaatatttgggtgaaagcgcaaaactattatcatcacaaagtgcttgaaaagatcggtgctgatcgtattatccatcccgaaaaggatatgggcgtgcggattgcgcaaagcctttcggatgaaaacgtcttaaattatattgatttgtcagatgaatacagcatcgtggagctttcagccacgaaaaagctgcatttaaaatccattcttgagctcggcgtccgggccagattcggctgcaccattctcgccttgaaacataacggagacattcagctgtccccttctccggagactgtcattcatgaatgtgactgccttgtgctgatggggcataaacgtgatattaaaaggtttgaaactgaaggaatgtaaaaaagccggcgggctgccggctttttttgatgcttatgtttcttcacttaactggacggcggtttggtcaacccagccgatcagctcatctttcacttgaatttggtaccagacggattctccgttttgtttttcagatacgactttaatatgctggccggtaaacttttgcgccgatgccagtttaatagaatgccgctcttttgacggcttggaccacacgtcttcaatggcgtggtctttgatggcgcctttcatatcaactgctttaagagaggcattgattttgtcatattcattcagattataggtttctatgacatctttaattttttcagcatagccggggtctgtggcgtagccggatttttgaagggcagccgccgctgttttataattgtccgcttcaatgacggtcttatacttctttttattccaagacgttccgttgacaaataatttggcatggtcatccattgattcaaaaaacgtgctgtatttacggaattttgcccgaatcgtttttcgttttcctttttcaaattcatccgttttcatcgtgacgtgttttcctttataatcaccttttacaccgaacaggttgcgcgctttccccgcaagctcactgttcccccagtccgattcgagaatggcctgtgcgagggtgatgctcggaaggacatgatatttctcatataaaatttgagcatgcccggaaaggctgtcaataaagacctgctgctcgtccacctcttcaggcggtttttcttccgtcactatgaatttcgaaaacaccattgataccagaaataatccgaatataagagatacagcaaaaaggcacccaagcccccttttggtctttgctttctttttcatatcaaccttcctttaattccggaatcactagatttataattttactggtcattgatgaaaatttcaataaaatagggaaaaagacggagaaagaacacattgtgcaaataaaaaagactcccctttgaggagtcttttttgttatgccatgctcagctgagggccgaacaattcatattgaacggaatcagagtcaaacccgagtgcaagaatcatatctttcatttgcgtcataaactgcgctgatccgcacaagtaaaattcagcatcttgattcagatgaagctgctccaagaaggtttgatcaatcctgccgctgtaaaaaggcttgtctcctgagcggtcttgttctgccggttcactgtatacataaatgacgttaatattcggatgattctccgcagcttgttcagcctctttgcggaacgcggcgtactctccgtttttcgcggcatgaataaaagtaacggcacgctccggctgtttttcggcggctgttttcagcatgctcatcatcggcgtgattccggaaccggcactgataagaacaaccggtttttcggcagaagacagcttgaaatccccggcgggtgcgctgacttcaagtttatctccctcttgaacttcattgtggagatgagaagaaaccgctccgtcctttttcacagaaatccgatatgcccctttttgagaagcatcagacaggctgtactggcgaatgtgcgtataaggagaatccgcaatccgcactttaatgctgatatattgtcccgcttcaaatccaggaagcgaagaaccgtcactcggtttgatataaaatgatgtgatatctatgctttctttcgttttctgtataaccgtaaattctttatacccctgccatccggcttcattgtacatgtctttttcaatgccgatgaaagcctccgcaatcacaccgtaagctttttcccatgcctgcataatctcaggagttgcggcatcctgcagcacatccttaattgccagaagcagatactttccgacaatcggataatgttccggttttacaccgatgcttgtgtgtttatggccgatctgtctgaccgccggaatgatttgttctagttgatcaatattcgccgcagccgcaatgactgcatttgccaatgctgcgcgctgagtctgtttcttttggttcgtttggttaaacatatttaacagttcgggatgatcttgaaacatcaggttataaaagcgtccggtgatgttttctccatgtgttttcaatacgggtactgtgcttttgatgatgtctattgttctctcatccagcatgttaatcctcaacccttctaaagatgtattttcaatatatctttatagtaagagatattttgaataaaagatatatttaaaatgaatctttaaaaagtcgtcacaatattgtgttggatttggaatttatggattttacctccttttttatcacccggtgaaacagggacacatatatttgggaatatacgtttaaagatgaaagcgggggagtgcatggtttccgatatcgattacacgtctccgaatacacagttcacttataatgtgaatgagagccgtttttttacgaaagatgctcggaactttatcaatgtattggggattaaacagttaaacacgcttgaaaatatttcattattagatatctttctgagcaaaacaaatgtgattgaaccgcatacccatcaaaatgccgctgaattggtgtactgtatttcgggttccgcggtggtgtcgatgctgaatccgttcacccagaaaatacggaattatccgatttcttcaggacaagtggcgaatgttccgcaggggtggtggcattatgaagtcgccacttcagacagaacccaccttttggccatatttgacgccccttcgcctgaagtgatatacggctcggatattctccgtctgacgccgcctgagatcatggcgcatacgtactgtctgaatgagcatgagtgggaaaaagccgtttccccgatccggcaatcaactgtgataggtcccgataaatactgcggacagactgaaaacacgggtattcatgatatgaataagccttatcagccaaatacgcattatccgaatgatccgtatcggcattatgatacgccgttatattggggatattaaacggagagccagagcggcatcgacagaaagagcccctcattggagaggggctcttgatcattacggtccggttccgcagcttactttgtactcgccttcggacgatttttttgaataacatacgtgcggcgtctgtccggtatcatctttccaattgaaccaatttacataataaaggttcccggcctctccgccgccttcttctttttgaagaatcgcaaagtagctttgatacggatatccttttttataaatgtcatgcctgatggctcctttttctgaagcagacgtgaagacgacgggagaaagagccgggagcgctgttaaaagaagtgccagtgccgctgaaagagttagtagaagatagattttctttttcattttctctctttcctttattttgagttgttagaaatgaagcagaacatagaggctgccgcagaagatgaaaaaacaaaaaaacccttatttatagaataagggtttaaaggtatggagccaagggggctcgaacccctgacctctacgctgccagcgtagcgctctcccagctgagctatggccccgtgctgtaacgtcatgttttattatagacgactcttctatgaatttcaagcagaaaattcagtttgctcatattttcctgagacatttttcgaacataaaaagaagaccctccggggggcctcttcgtttatcgcacgagcatgattaaaatgatgccgaggatgacacggtaaatggcaaacgggacaagcttaatccggttaatgagccgaagaaaaaatttgacgactaagagggcgacgacaaaggcgcagataaagccgacaagaaaaaacggaatcatgtcataagaaagactgctccagtatttcaccagcttcaaaaggcttgcgcccgccataatcggaatagccataataaatgtgaagtctgcggctgcccggtgattcaagccgacaatgacacctccggcaatcgttgagcctgagcgggaaaatccgggccataaggcgagacactggaataatccgacacagaaagcctgtttgtaggtgattctgtccaccgtatcgatcgtttctttccttttattgatccagtccgctataagcataagcacggctccggcaattaatccgtaagcgaccgttctgacggagaataaatagcggtcaatgaaatcctcaaataaaaagccgagcaccgccgccggaacaagaccgacggcgatttgcgcgatggtcagcctgtatcccttctgctgatcgcgcgtgacgttttttttgaggccgagtaaatgtaatatccgatccttaaacacaatggccaccgccagaatcgaaccgagctgaatcaccactttgaaggaattggcggcttccggattcatcaggcttccggatttcagccagatgtcatccgctatgatcatatgtcccgtggaagaaaccggcgcatactccgtcagcccttccacgattcccaaaacggctgctgtgaacatctcccatagtgtcatcccattcttcccttcattcatcatttacaaaagagaagctctcctctgaaggaaagcctgtcttataataaatatcatatccgttccgattttatgacttcgatccagcatcatttttttcttcttcatataaatgcgaacgcattttgaaccaatcaaacagatgggtcgtgaccactttgatgaccgcataccccgggatggctaaaataatgccgacaaccccgaacagctttccggcggttaaaagaacaaagatgatggtaatcgggtgaatgtgaagatttttccccatgatctgcggcgaaattaatttcccttccacgagctggacaacggtccatacaatcgcaagcttcagcagcataaggggcgaagtgaccaacgcgataataatcgccggcgtgatggcaatggtcggccctaaatacggaacaacgctcgtacaagcggcaatgaccgcaagcagtgacgcataatcaagtccgataatcagatagccgataaataataaaaacccgatgcagaagctgacgatgacctgtcctctgatataggaacttaatctgtggttcatttcactaagcatcgtatacgtttgttctttcagacgggtgggcacaaactttaagatataaatcggcagttttttgccgtctttcagcaaatagaacagaataaacggcacggtcacaattgaaataatcacttccgtcagcgcgccgataaaattcccgactccggtaaatgtgctgtttgcaattgtcgccgcctgcgccgatactttattagcaagatcggaaatgttgatattcatcgtcttttgcgcctgatttacaaaatcgcttccgatcaggcttttcgtctgatcttcaacgatatccacatatttcggcagattgtcgatcaggctcatgatctgttcctttaaaaacggaataattgaaacgaccgtaatcgtaatcagccctataataatgaggtaaaggagcaggatggaatagactcttttcactcttattttttccaatatatctacgatcggattaagcagataataaacaattcctgtcaaaatgacggggagcgcaatcgttttgagcaggacgataataggtgtgaaaataaatgatgtcttcataaagacaaggatattgagaccgatgagcagcaatacaagcaaaaacaagacaaatttattgtctaagaaaaactgtttaaatctgccgccccatgtttgcaatgtttccactattgttcctccatcatatgtattttacttaaattgtacactatcgttcctgtaatgaaaaataataaccggtctctatgggaatttttcctatccctttagctggcagccttttttccatttatgtttctcagaaaaaaagctataatgtaagccaatacatagaaggagcgatagcaatgattcgatttgcaacagtcggaacgaattggattacagaacgatttctggaggcggcttctgctattgatgattttcaattaacggcggtttattccagaactgaggaacgcgcggcggaattcgccggcaaacacggcgctgctcattattttaccagcctgaaagaaatggcggaaagcaaagcctatgacgcggtgtatctcgccagcccgaatgcatttcacaaagagcaggcggtcctttttatggaacacggcaagcatgtactgtgcgaaaaaccgtttgcgtctaacgcaagggaaacggatgaaatgattcacgcagccaaaacgaacggcgttctcttgatggaagccatgaaaacaacgttcctgccgaacttcagcatgcttcaaaaccacttacataaaatcggacccgtcaggagattcacggcaagctactgccaatattcatcacgatatgatgcatataagaacggtacggtgctaaacgcgtttaagcctgaattatcgaacggttcgttaatggacatcggcgtgtactgcatttatccggccgtcgtcctgttcggcaaaccgaaaaacgtcattgcgaccggtcataaactagcatccggcgttgacggcgaaggcacggtcattctgtcatacgacggatttgaagcggtgatgatgcattcgaaaatctcaaattcgtttgccccggcggaaattcagggtgaagacggcacgatcgttctggacagcattcacggaccggaacgggcggaaatccgctatcgtgacggccggacggaagacatttcagtccctgatctgaaaccgtcgatgtactacgaaacggctgaattcatcaatcttcttcgaaacggacagcgggagtcttccgaaaatacatttgaacgttctttcattacggcaagcattatggaagaagcgagaaaacaaatcggaattgtctttcccgccgatcaaaactaaaaacatccgcccggattcgggcggatgtttttcatttggatgctaacaggtcagcaaacgcttttgcatactgcggaaggtcgggcgggcggcggcttgatacaatgtgtccgtcagttacgacagcttcatccagccactgtgcccctgcatttgtcatgtcgtctttgatgccgggcgtgctcgttactttttttcctgcgagaattccggcagatatgagcacccagcccgcatggcagatctggccgatcggctttttctgctcgttcatcgtacgaatgatgtccaaaacttcgggatatcttcgcagtttgtcaggtgcccagccgccgggcacgagcacggcatcatactcctgaataatcaggctcttaaaatcgtaatccgccgtcgcaggcacaccgtattttcctttgtatgaacggcccgcttcttctcctattaaatgaacgatcgcgccttcctctctcagccggtagacgggataccaaagctctaagtcttcaaaatcgtcactgacaagcgctatgacttttttgccttctaatctcatcactgccactcccttcttttatactagtgtatcgcttttttaaaatgaggaaaagaaacagctcgctacagctgttcttcgtcttcagactgaatcgtaaatttccgtgtgacctgctgcagttcttcagccatatgcgcaagcgtttcggcggatgaactgatttcttccatggaggccagctgctcttcagctgaggcggcgatgtcttgaatgccggcggacccttctttggcgactgaggtaatgtcctccaccgcgtttgtcacattttgcgacccggctgcaagcttctcaagcgttccgttcatatgctgcaaggcgcctgaaatctgagtcgtcatttctgagatttttttgaagctttcggccgtttgatccgtaatatcgaggccttccttcacatcttgattcaccgcttggaatacggaaagcgatgtggcgatttctttgacgatttcctgaatcagcgtttcgatttccttcgcggagccggctgattgtacggcaagctttctcacttcttccgcaacgacggagaagccccgcccgtattcgccggctctggccgcttcaatggcagcgtttaaggcaagcagatttgtttgatcggcaatgccgttaatgacgttgagaatgctcttaatgtcgtgcgacttcgtttccagcccttttacgaccgcttccgcctgctgtacggaacgatcaattgttttcatctggccgaccgttttcgccactaattcttctccgctcccggccgtttcagaggtttggatggcggattcagtgatttccgccgatacattcgccgtctcggcaatgcccgcattcatttgggaaaggtgatcagcactttcttccaatttctcgctttgtgattcgtttccgtttgagaattgttcaatcgccagtgtaatatgctctgtcgccttgcttgtctgtccggcggatgccgtcagctcttcggatgaagaagcgacatgttcgacggatgactggatgacgccgatgacagaccggagtgacgccgacatctcattgaagctttggctgagctgcccgaattcattttttgacttgatgtcaatgacttccgttaaatcgccgtcactgattttagctgatgtcgaaacaagttttttgagcggttttgcaatcgagcgaatgataaaaacgattaaaataccgccgacgataagagaaaccgccaggatgatcagcgccattttcatgacaggcgaggctgcgtcatggatctcactgacaaaaaatgtgccggcgattttccagcccgtcagtttgtttgtcgtgaaggccattttcttctgctgtccttcaaacatgtattcaaacgatccgcttgatttggaaaatacttcttccgtccactctccggagccttccgttcccgcttttatagtcggatgcgcgatgtattttttatctcccgttgtaatgaaggcaaaacctttatgaccgatctggacgcgttgggaggcattcagcaggtcgcccagattaatatcaagcgccacaacgcctgatccgtcttttgtctgctgggcaatcgtaacgaccgtctgtccggttgcagcgtctttataaggctcggtaaacactggctgtccgcttttttcaaccgcttttgtataccactcgcgcgtgagcggattataatcggacggcatgtcaacggacggatatttcacgaacgctttgtcgcgagacgcggcgtaaattgacgcgacatcgtcatttacggtgacatactgcttcattttgtcaagcagtaccgattgatttttcgtctccagtttttcctttgtgattgattcgctgtagtagtcaatcgctttcagcttaccctcaagcatgttttccagcacgctgttcagttcgctgacatttccctgggcgctgtgggtcagttcgctttctagtgaattccccgccgtttggtagctgaagtaggcgagtatgccgaccggaagcaccaatacggctaaaaatgccgcgatcagcggtttgctgatggatggctgtttgatccaatgtatcagttgtttcattttttcagtctccttctttgaaaagctaaatctaatatcgtcagataggacaaaagatttattaaaaaaactaaaaaaaacacccaaacagcacatttgggtgttctatgacctattaatctattttaaatcgtttcgtcatatcacgtaattcttccgccatttgggataacgtttccgaagacgaactgatttcttccattgaagccagttgttcttcggcggaggccgcaatatcctgaatgctggcggagctttcttttgcgatggacgcgatttgctcagaagctcctgaaatctgctgagatcctgctgtcagctgttctaccgtcgcattcatattttgaatttctccggcgatctggttcgtcatttcagaaatccgtttgaagctcgtttcggtctgattcgtaatatccagtccgctctccacctctttgttgacggattggaacatgccgagagatgtattgatttcgttgacgatttctataattaagctttcgatttctttcgctgaatcggcagactggaccgcaagttttctgacctcttcggcgacgactgagaagccccggccgtattcacccgcacgcgcggcttcaatggccgcgttcagcgcaagaaggtttgtctgatcagcgattccgttaatgacacggagaatgtttgtaatgtcttttgattttgtttcaagtccgcgcaccacttgttcagcttctttcactgaccggtcaatgacgttcatttggccgaccgtctggtggacgagctttccgcctgaattggcgacttccgctgatgtggcagaggattcggtaatgacggcagatgctttcgccatatctttaagcccgctgttcatttggtaaatatgttccgccgcgctttcaatattttcactttggctttcatttccgttagaaaattgttcgatcgccagtgtgatatgttcggttgccttgcttgtctgctccgctgaagccgtcagctcctctgaggaagatgcgacgttattcacggaatcctggatggcatggatgagagacctgagcgaagcggccatattgttaaagcttttgccaagctcgcctaattcatcttttgagtgaatctcgatcgtttctgttaagtcgccttcactgatctgtttcgatgatgtcacaagctgcttgagcggttttgtgattgaacggataatcagcaccatgacgatggttccgatcacaatcgctaatacgagaacgagcagggacagatgaaggatcggcagggccgcttcatgaatttcgtccagatacatcgttccggtaatcttccagcctgtcagcccgtttgtatcataagccattttcttttcctggccgtcgtatttgtattgaaaatcaccttttttgctggtgaacagctgttcagcccactccccgtttaatactgtgcctgacgtgcggttcgggtgggcgaccacttttttgtctttcgtcaggataaaagcgtagccggatttcccgatgttcactttctttgtcgttttcagaagctcatcgattttcatattgatggcgacgactcctgagccgtcttttgtctgctgaacgaccgtcacgaccatcgtattggtggaagccgtgcggtaaggatctgttacaacaaccttccccttattttccacggcctttttataccagtctctttcaagcggattatatcctttaggcatctgcagatccggataccgtgtgaaatgtccttccgtgtcactcgtataaatggattccacgtctttattgatcttcatgtactctgtgaatttatcggtaatttgcgattggtttttcggcttgtaccgatcctttgtgagccaatcgctgaaatatgccgttccgtcttccttttggctgatgcttgtgttgatcatatcgttaatctgctgcacattatctagtgcgcttcccatcatctgcctgtcaagcgtgcttactgccgattgataggcgataaaagccagcgttgaaataggaagaatgagaatggccaaaaaagaaatgagcagttttcttgtaagcgatctctgcttgatgatttgcacaatttttttcatctgctatatctcctcttgcgtgtttacccttcatatcggcaattatgggtaaatatacacatccaaaaagaagaaatataacgaaacatactttttacctatcttaaaattagtcttttagacttaattaagagtttatcttaaaacgctttgtcagttcgcgtaattcttccgccattttttccagcgtgacggcggaggaactgatttcctccatggacgcaagctgctcttcagctgaagccgcgatgtcctgaatgccggccgcgctttgtctggagacggccgcgatatcctctgaagcgtttgatacttcctgagacccggcagaaagctgttccacggttgcattcatattttgcagttcaccggcaatctgatttgttttaacggaaatgtcccggaagcttttttccgtttcgtccgttaactgaagtccgcttttcacctcgtgattgacggattccagcattccgagcgaagtatgaatttctttgacgatttcatgaattaaggattcgatttctttcgctgaatcggcggattggacggcaagctttctcacttcttcggcaacgactgaaaaaccgcgtccgtattctcccgctcttgccgcttcaatggctgcatttaaagcaaggagattcgtttgatcagcaatgccgttaatgacgcgcaaaatgctggtgatgtcctgcgatttgagttcaagcccttgtacgacttgctccgctttacttacggattggtcaatggcgcccatctggccggctgttttcttgacaagccgctcaccggcatcggatatctccgccgattcaattgacgtttccgtcaccacggctgccgcttccgccagatcactgagcccgtctttcatctcattcacttgggctgtcgctttatcaatactctcactttggtcttccgttccattagaaaactgttcaatcgcaagggtgatatgttccgttgctttgctcgtctgctcagccgaagccgtcagctcctctgaggaagaagcgacatgttcaacagagtcctgaattccctgaataagcgaacggagtgaatctgtcatatgattaaaacttttaccgagcacgcccagctcatctttagagctgacatcaatggtttccgtcagatctccgctgcttattttttccgctgatgctacgagacgttttaacggtttggtaattgagcggatgacaaaataaatgaaaatcatccctgcggcaatggctatcgccaatatgataacggccagagtcagaaccggtcttgccgcatccttgatttcttccacggacatggttccgctgatcttccagcccgtcgcttcattggtcacgtacgccatttttttcgctttcccgttcagcgtatattcaaagtcgcctttttgcccgctgaataatgtatcaacccattttcccgataccgccgcgccggctttttcatcactgtaggcaacggcttttttatttttgctgaggataaaggcgtatccttcttttccgatgttcacttcttttgtcatcgtgatgagatcgtcgatttttatatcaatggcgacgacgcctgatccgtcttgcgccgcgcgggccatggtgacgaccatctttttgtttgagatggactcataagggtctgtgatgatggtttggcctttattctccatagcttcctgataccagcttctttcaagcggattgaaatcggccggcatatcggcatgcggataacgggtaaacgttccttccttgctgcttgaaaatacggcggatgctttatcattgctttcaataaactgtttgaacctttcttgcatttccgtttggtttttttctttaaatttagcgcttgtcgcccattcgctgaaatatgctgagctttttgtaaacattccgatccggtcatcaatcatattgtttaagatttgcacatttccttcggcgctttccatcatttgcttttcaacggatgaagccgccgaacggtaggcgccggcagccaatactgctaccggaatgattaagatcagtaaaaatgaaatgatcagttttttggctattgattttctggcgattttttttgctgtttttttcaattttgtaaacctctttcaatcatttactgtttatatcggccgactccctttttattacattgaaaattaagtcataaacgaaaaatagttctatgtactccctttgtatgcaagactttttatttaattatccggctgtcactataaaaaaggacgccttccatccggaaagcgtccttttttactagttgattttaaattgtttcgttaattcccgcagttcttcggccatttgcgccaaagtatcggcggatgtgctgatttcttccattgatgcaagctgttcttctgcggatgcggcaatatcctgaatgcttgctgcgctttccctagatacgtccgcaatatccgtcactgcggctgaaacgtgctgagagctgtctgacagctgttcaaccgtgccgttcatcgattgaagcttctcggcgatatcgtttgtcatgccgaagatattctggaagctttctttcgtgcggtccgtcacggcaagtcctgattgaacttcttcattaacggatgtaaacatgtgaagtgatgtattaatctcggccgtgatttcctgaatgagtttttcaatctctttggcagaaccggcggattggacggcaagcttgcgcacttcttcggctaccactgagaagccccgcccgtattcaccggctcttgccgcttcaatggctgcatttaaagcaagcaggtttgtctgatcggcaataccgttgatgactcttaaaatatgagtgatgtcttttgatttggcttcaaggccttttacaaccgcttccgcctgctggaccgattgattgatgagattcatctgcccgacggtttgctgcacatattcttccccggtgccggcagcttccttcgattgtttagatgcttccgtaatggatgatgatgtgcgggaaacggcggtgagtccgtcatttatatgattcagcttggctgagcttgaatcgactttttcgctttgctcttcgtttccgtttgaaaactgctcaatggccattgtaatatgttccgtcgctttgcttgtctgcgaagctgaagcggtcagctcttccgatgacgcggccacattgtcgacagagttttggatcgcgctgatcagtccgcgcagagattctcccatttcattaaagctcgcgccgagttcgcccaattcatctttcgagcggatatcaatggtttcagtcaagtctccgccgctgatttgtttagaagagcggacaagccgtttcagcggtgacgtaatggatctgacaatcaacagaattaaaattcccccgatgataatggatgctgcaaggacgatcattcccatcgtcagcaccggttgtgaggcgtctttaatttcgttgagctccatgctcccttctattttccatccggtcagtttatttgtcgtaaacgccatttttttattttgatcatcgagcgtgtatgaaataatgccgctgtctttgctgtatacttcattcagccacggggttgaaactttatcgcccggtttgtggtctttatgcgcgacataggttttatttttggacgtgataaacacgaatcctttttgcccgattttgattccctgcatctgcttcagcagctggtcaatcgtaatatccatggccactacgcctgttccgtcctgcatctgctttgccacggtaacgaccatgctgccgtcgcttgccgcggtgtaagggtcggtgacaacgagcgtgccgccggccttcacagcgtctttataccaagtgcgtgttctcggatcgtaatcggccggagtattctccttcggcgcctgtgcgtagctgccgtcttccgttcctccgtaaatgcgggctacgtccttatgaatagacgtgtattgcccgaacttttcttcaagagcagacatgtttttctttgagaaggatgacccttttaacgtttcactgaaaaattcaatcgcctttgcttttgagccgatatcatttgtaatcgttgtgttaaaagattcgatgttatttttcgcgttgcctgaaatctgatcatccagcgaattgctcgccgtatggtatgaactgaattctaacacgagaatcggtatgattaagatcacgataaatgaaatgattaatttacgtgaaatcgatgcctttgtgcaccaattgatgaattttttcatattaagctgctccctcaagtgtgataccttatatatcggctcagtcttcacattttgttaacatttcctccttttttatgtcttgattttcattgcccaagcttcctgcatatcttataaaaaaagagaaggggggcgcgcagatgattatcatatccggccaagtgcttcgtcctcaggacatcgcgaactggcagacggaagaaagccttgttccgtatataaatgaactgctcaattctcccgtacaattcgattacgggtcgattgctgaactgatgttcgaggtgcggctgcgccgccatattgtggaagccgcaagagaactgcacggatcaggtgtgaaatttgcaactttcgccaaaacatacggaaatacggcttattggagagtgacgccggaaggagccttggagctgaagtacagaatccccgcttcaaaagcgattcgggacattattgaaaatggggcgttttacgcatttgaatgcgctaccgccattgttgtgatttattatctggccgtcttaaagacaatcggtgaagaacggtttaaccggcgtttccgggatatcactttgtatgactggcactatgagcatctgccgatctacacggaaaccggcagccactttttacggggagattgtttatattttaaaaatcctgattttaatcctgcaaaggctcagtggcggggagagaatgtcattgtgatggggaatgatcaatatttcgcccacggtctcgggattctgaccgctgaacaaatcatccagagattgaattctttaagaaaaaaaaatgccgtgcagccggcttatctgcttaaccaggcaacaaggcttgatgcacccgcgctttaccagatcatgcattaaaacaatcccatcgtctgtcattgtgacgatgggatgcggaatgcttttcttttccggtaaaaagccgtcgtgccgagcgcttgatttgcagcccattcaaacttctctaaatcatggcgggtgacggctctgtcccgtcggctccatttaatggcgcggacaaagtaataccctttaatcggcgccatggtgactttggaatgcggaaaatcttcaaagacaaactcaatagtccctctttttttgtaggacatttgaagaatcttcatcatccatcacctcacgatttctgaattatgattcgcacaatctgtccaaaacggttttcacgtctgtcggcccttcaagtttcgcggcggactggccggcccataaagacatatactccgcgtctcctgattgagccgcgtgcccgcgcatcggctttgtcagcgtattatgcagcggataaggcagcgtatttccctcgtcagcctcatatgttttcatgaactgattcacgattccccgcgcctgttttcccgaaaacagggtggtcagccgcgtgtcggctccttttgattcggcaatggctttttgatatgccggtgaggcgctgctttcttcgcaaagaagaaacggtgttcctacttgaacgccgtccgcacccaaacagcgggcggcctgcacgccgcggcggtcaaaaatgccgcctgccgcaatcaccgggatattcagcgcgtctttagcctgcggaatcagcgccataaggccgagagccggttctcctttaaccggcagaaacgacccgcgatgcccgccggcttctattccctgaagaataacggcgtccatcccccgttcttcaaagaccttcgcttcctccggcgttgtcgccgtgccgaaaaggaaacatccgcttttcttcagcttttccgccgtttcttccggcggcaggccgaaggtgaatgaacacgctttgactccgtaacggatcagaagctccgctttttcctcgaaatcattccattcttctttcagatcagagaacggcttggcgtcttttgccctcgggatgcgggctttccatttttcaacaagttccgcctcaggcatctgcctttcttccggaacgaaaagatttacttgataggagcggttcgtcagctctttcatctcgataagctgtttttcaagcgcttgcgggctgacgtatcctgaagcgaggcttccgagcgccccttcatttgataccgccgaagccagacgcggcgtgaccagcccgccggccatcggcgcctgaatgacgggctttgttaatgataatgcactcatccactcactcatttgtgttttcctccgtttcagcctgtattttgatataacaggttctgtttcgcggaccgtcaaattcgcaaaaataaacgccctgccatgttccgagtatcaggcggccgtcttctatgatgacatgctgggaggcgcctgttgtactcgctttcatatgtgccgccgtatttccctccatatgccggtccagttcgtgctcccacggatacatttcatcaaaccttctgagcatatccctcttcacatccggatcggcattttcatttatggtaatgccggcggttgtatggggacagtatatgagcgccaaaccgttttttacgcctgttttgcggagaaacgcttcggcttcatgtgtgatgtcgatcatttcagcccgtctgtttgtttgaatctgcaattttttcagcatatgaatgcctcctttctttttctcttcctttcccatattcgtttctgtatttgtcttttcctgtcggatcgcgatgataaacgcagatcacaaaaaacttcagcctcgggactgaagtttttcaccatatatatacgcgggcctcataaggctttaaaagaaaggatgtcacatgccgatgcggtggtgtttccatgcttgcgagcacgagcgtatcggagtcaagcggataaccgggatgcttgtataaagcgggggttcgggacagatttgtgatgatcagggcggtttttgttccgttttttcttagataggcataaatctgccggtcattcggaagcagcaattcatatgtgccgctgatcaatacgctgtgttcttttctgagggcgagcagccgtctgtagaaatggtatacggatgtttcatcctgcatttgtgatgcagcattcagccatgtgtggttcggattcactccgagccacggagaagcatcagaaaacccgccgttcgcctcatcgctccattgcatcggtgtccgtgaattatcccggcccttcttccagatgatcttcatcactttttcatgcggaacgccgcgggacgtctctttttcatacagatatttcattgcggcgtcatcataatcttcaatggatggaaacgaaacattggtcatcccgagctcctgcccctggtaaataaacggcgtgcctttcatcagcatatacatcgcggcgagtgccttggcgctttctgtcaaaaaccgttcgtgaccccataccgagacggaacggggctgatcgtggttctccataaataacgcgttccagccctttccttcaagactgttctgccagccggacaagacgcgtttaagcgccggaatggagatgctttgatcatcttccgtatcccagaggccgagatgttcaaattgaaaaatcatttgaaagacgccgtgttcttcaccggcccaatcagccgcctcccaagccgccactccgttcgcctcgccgaccgtcatgatcggatagcgcgaaaatgtttcccgtttcagctctcttaagagatccattatgccttccccattcatatgatacgggaaagacgggacgtacgggagaccgtccggattcggcatgtcagggagcccttcttttttcttaatgtgagaaatggcatccaccctgaagccgtctatgcctttatcaagccaccagcggaccatctcataaacggactgcctcatcgcttcgttttcccaatttaaatcaggctgttttttgtcaaacaggtgcaggtaatactggccggtctcttgatcatattcccacgctgatccgccgaaaatgctttcccaattgttcggctctttgccgttttttccgtctctccagatgtaccagtcccgtttttcggaatctttcgctgagcgtgattcgataaaccaagggtgctcatcgcttgtatggttgatgacgaggtctataatcagcttcatgccgagcgcatggacatccgcaaggagccggtcaaaatcctccatcgtcccgaattcgccggcaatttgtttataattccgaatatcgtagccgttgtccgcgcccggcgagtcaaaaacgggacaaagccagatcacatccgcccccaactcttttatgtaatgaagctttgctctgatgccgttcatgtcgccgattccgtccccgttcgaatccataaagcttcggggataaatttgatagacggccgccgttttccaccaatccgttttcataccgacactcctttctttacattatatgaaggagcgggacgaagaagcattttttccataaaaaaagcctcattgcaaaagcaggaggctcagaaatcagtttttttaatttcaacgaagcggatatgatggtcttccgcttccagcaccttaaattcacacccttcggcatgaaacacatcaccatttttcagctccattttttgtgttaagagccagccggcaatcgtgtcaatgtcttcattttcgatggcgataccaaggagatcattcacctcttctatgagcgccttgccgtccatcacatagtggtgttcgccttttttgacgatgtggggcatttcatcctggtcatattcatcacggatttccccgacgatttcctccaatatgtcttcgacggtcacaagtcccgccgtgccgccgtattcgtcaacgagaatcgccatatgaatccgctccttctgcatgcggatcaaaagctcctgaacggggatgctttcaatgactctgatgaccggacgcataatttcttttaattcaatggagcggccgagaaaatacgctttaaataaatccttattgttaataatgccgagaatgtgatctttgtcttccttaataaccggatatcgcgtataccgttcgttgatgatcaaatgtatggcttcatcaactgactgttcaagcgagatggcggcgatttcggtgcgcggcaccatgatttctctggcgacccggttatcgaattcaaatattttattgacgtaacggaattcagattgattgatttgaccttttttatagctttcggacaaaatcagccgcaattcctcttcactgaccacgacctcatgttctttcaccgaatgaaaaccgaacagcttgaccaaaaatccggctgagccgtttaacagcttaataaacggatacatcactttataaaacagaatgagcggtttcgccgtccacagactgacggcttcggctttttgaatggatatcgttttcggcgcaagctctccgatgacgacgtgcagatacgtgacggcgataaacgccgcaataaacgtgacgacgtgcgtaatggatgacggcattccgatcaggctgaaaacaggatgaagaagccgctgaatcgtcggttcaccgagccagccgagtccgagcgccgtaatcgtaatgccgagctggcacgctgataaatattcatcgagatttgaaatcaccctgtgcgccgcgagcgcccggctgtctccggtttcaaccagctccgcgatttttgaaccgcggattttgacaatcgcaaattccgcagcgacaaagatggccgttaatccgattaacagcataatgagaatcagttttaatataagcaaaaaaacccctaccgcaaacggtaaggggccacctccttcgtgttaattctcatcacgaccatttaagaaaatcatcacaaaacgaagcagctcgaataatgaaacgagcgccgcagccacatacgtcagcgcggcggcgttcagcactttattcacgccgtgttcttcactgttgcgaatgaatccttccgacacgataatccgcttcgccctcgcgctggcattaaactcgacaggcagtgtgacaagctggaaaaaaacagcggccgaaaacaaaataatgccgagtccgattaagttcaagctgcccaggagcatcccgcccaagaaaagcagaggggcgaccccggaggcaaaattgacgaccggaaaaattttgtgcctcagcacaagcgcgccgtatgattcctgatgctgcaaagcatgtccgacttcatgggaagcgacggaaatggcggaaatggagcggccgtaatataccggctcagataaacgcaccacccgctccgtcgggtcgtaatggtctgttaaagtgcctcttaccggttctaccggcacatcatataaaccgttaatatcaagaatccgtcttgccgtttccgcccccgtccgctgactggaagcttctacgtctgagtatttctgaaaattgcttttcactttaaattgtgcccaaaacgacaatcccaatgcagcaattgttaaaaagataaacagcatattatcctcttcctttttctcttatatcgtacgatctgcttatatattattttaatgattgtccgctttcctgtacagaaatccgcttcttttttctgacaggaatcaatcctccgagcatgatgaggatacacccggccaatccgatgtaaaacggaaacgtgcctgcggtctcttttgcaaaaacaagccatgaaaatccgccggacatatgattgtatccattcaaatcgaaaataagcaatacggccgccgaagcgagcagctgcgctccggccagcgccgccagcagtttttgaatgactgtcatttgactcaccctttttcggtccgctttctttatcatatgaaaaaatgagggtgaatatgttttcggcgatttttgaaagacatcaaacgaactgggacatactgtataaaaaaagatacaggtgtgatcgacatgaaagtgacaaatggcgagaaagaacagctgagcaatgcgatagacagaatgaacgaggggcttgacgcctttatccagctctataatgaggcggaaaacgacgaacctctcatacagtttgaagatgagacggccgatttaatcagacatgcgcgtaactcatacggccaggaacagctggacgaaaaactaaacaccattattaagcagattttatccatctctctgacgaaagaagagccggacgaatgaaatcaaaccgtatttttatttcctggctgagatggccgttatatgttcggatcggactgatcattatcgctttgattttattgttcggccaactcatttacatgcttgagccgaagcaattcacgtctgtgtttgaaggggtttggtgggcggttattacggtggccacagtcggctacggcgattacgttccccagacaccgctcgggcagattgccggcatggtgcttgtattaagcggagcgagttttgtgaccgcctatttcgccacgctttcttcagccgtgttcagcaaacagcaccgctatgtcgaagggaaggtcgcctttaaaggcaaggggcacgtcattcttatcggatggaatgagaagtcgcatatgctgctgaaagaactgcagcacatcgcgccgtcaaaaactgtcgtcctgattgatgattcattaagggaagggccgcttattgaaaacgtccatttcatccgcggacatgccgctgatgacagtacgctcaataaggcgaatattacggaagccgataccgtcattttgacagcagaccagcagaaaaatgaatccgaagctgatatgctgtcggtattaacgcttctcgccatcaaagggctgcatccgtccgtttattgtatcgtggaaattttaacggaacggtatgtcaaaaacgccgagcgcgcaggagccaataagattctgtgcacatcacgcctgtcgagccgggtgatgtttgagcattaccgggtcaagctgcagcttgccaaaccgcaaacgctgtcagatctgacgctggagaaaaaggtgcgcatcattcccgtccccgaggaattaaagggctcatcttatcatgactgtgcgctctattatctcaaacggaataccacgatcatcggcatacaaaaagaagaggggccgatgctgacccctcccctgtcataccaggtgctcgatactgatctgtttttggctctttaatgcagcaggacgtcttccagctctttcacaagcgagatgccgatatctgtatatgagcggtcaattgccgcatcccgccgtttcggctcggagaattggttgaataatgactcaaaaacaccgccgcctgcgtgatcatccgtttcctcctgatagacgtgcctcagcaaaaagggtgtgccgattgtaacggaggccccccgttcatccaggtgtcccttatttgcttcaacagggatacggagaaataaatagccgtcctgatcggaaattttgtaatcaaagaacccgcggtcatactcccagccgcctccgatggtataaccgatcggtttcagcacctgttccagttcgcggagtaaaaacgattgcccctcaagtgaagatggtatgctgatcatgtgcatatgctcctttttgtctttagcgtccccgctctgcggcatcttcatacggcgcccgggaagaatcgggagcggcagacagacgccggaaagaggtaacggcgcattcaatcagaacatacgtcacaattgcggagagaacggcttccgttgaaatatagaaaacggcggcatagagacagcacttcgtgatcagcgactgcatccggccaatcttcagtttcagccggaccatgtccgtaaacaagccgagagggaaagcgaaaaacaggatggtttgtaagagggattcaggagacagttttagtgccgaatagacaatagcggcggaacagacggaaatgacggcatgcttacataagagccgtatcattcatcatcacacctttcacggtttaaaaaaggctgacccgtcatgctgagggccagcccttctttttatttttcaaggcgtttttcaagctctgcttttttctcttcaaagcccggtttgccgagaagcgcgaacatattcaccttataggcttcaacacccggctgatcaaacgggttgactccgagcagataaccgctcatcgccaccgctttttcaaagaaatagacgagatatccaaatgtatatgcattaagctctgaaatattgacaattaagttcggcacttttccgtctgtatgggcaagcatcgtgccttcgaacgcttttttgttgacgaaatcgaccgttttgccggctaagtaatttaagccgtcgagatcattttccgcttcttcaattgtcagctcatgcttcggtttttcaacgtttaatacagtttcaaacagatcgcgtctgccttcctgcacgtattgaccgagagagtgaaggtctgttgagaagttagcggaagaaggatagatgcctttttcatcttttccttcactttcgccgaagagctgcttccaccattccgcaaagtattgcagcgcaggctcatagttgataagcatttcaatggttctgcctttattatacagaacgttgcggacgacggcgtattggtaagccgcgttctcttctaattccgagctggaaaagtctttgcttgcatcaagagcgcctttcatcatttcatcgatatcagccccgcttaccgcaatcggcagaaggcctaccgcagtcagaacggagaaacgtccgccgacatcatcaggaataacgaatgattcgaagccttcttcattagaaagcgtttttaaagcgccgcgctctttatctgtcgtcgcgtaaatccgcgctttcgcttcttcttttccgtatttttcttcaagaagtttgcggaaaatccggaaagcgattgcaggttccgtcgtcgtgcctgatttagaaatgacattgatagagaaatcagcgtcttccaaaagatccataacatctttcatataagttgagctgatattgttgccgataaagataacttgagggtttttgcgcttgtctttcggcagaacgttatagaaagaatgattgagcgcttcaatcgccgcgcgggcgcctaagtatgaaccgccgatacccacgacgagaagcacgtctgaatctgatttgattttttcagcgctttttttaatgcgcgcgaattcttctttatcgtagttttcagggaggtccacccatcctaaaaagtcgcttccggcgcctgttttttcatggatattatggtgtgccgtttttacgaaatcacgtgcgtatgtaagttcatgttcattgaaaaaaggtaacgctcttgagtaatcaaagcgtacatgcgtcatttgcttgtccctccatcacggtgaattgttttctctttcactttatatgaactcacccgctaaatcaagtcatgaagaaggcatgatgaatacgggatttgcgctaaagatgcgttcattttttatacaatatcccggattcgagatggttatatttgtattaactgtgagagggataacgaatcgaatgttggtgatccaggaacgtatcacctttactttggagcaggatgacatccatcgccaatcccgatgggccggttctttttatatagtactcctcttgagagactgccacgaaggcatattaagacataaatgtacaattttaaaaatagtgtctatatttggggtatcgtgttaagatgaaagtgattttaaaccgggaggtgattttatgactaaaaccattggtcttatttgtggaagttcacgaaaaaactcgtataattgagcaattgctcaatcattgattgacttcgataatgcggctcaatttcgttgggttgaaatagacagtcttcctttttttaacgaagatttagaaattgccggagcaccagactccgtaacatcctttagagctgatatacaagacgttgacggcgtcatcattgtaagtccagagtacaattccggaattccgggggtattaaaaaatgcattggactgggcatcgagaccgcggacctcttctgttttaaacagaaaaccggttggcttaatcggagcaacccccggagggttcggtactgcctttggtcaaacgcaaatgagggaagtactcgaagctatgcaagtcaatgttttgccctttcaaaaaatgctggtttcgcaagtccatgagaaaattgattccgctcaaaacatacttacggatgaacaaacaaaacgttatcttcaacgctatttacaacagtttatccattggattgatcatgctccggttcccgttccagattaattgaaggatcatccccctcacgaaaagtcacctcagaaataactttctttctatacagcatatgaatagatttaccgttttcaattcacaaacttacttgccttaattcaaggaggatgataaaatgtctgatctttattcccgtctttcaaaagatgatgctgccgtgcttttagttgaccatcaaaccggccttatttccggtctcgtgcgtgactatggcgttgatgaatttaaaaacaatgtactggctctcggtgatacggctaaattctttgatttaccggttattttaacaacgagttttgaaaacggacccaacggaccgctcatgcaagaactcgttgatctctttcccgctgcgccaaaaatagcccgtcccggacaaattaatgcatgggacaatgaagactttgttaaagccattgaggcgactggcaaaaaacagctgattatcgcgggggtggtaacagacgtctgcgttgcttttcctgcgctttctgccattaaagcaggctacgaagtgtttgttgtgacagatgcttcggggacgtttaataagcaagtagcagatgcatcattaacgcgtatggctcatggcggcgcgcagcttatgaactggttcagcgtagcatgcgagttacaacgtgattggcgcaacgacgttgaaggttttggcgcattaatctccagtcatcttcccggttatcaaaacttaatgggaagctatatgggggcgcagcgggaccttagtacacaaaatgcataaaaggagcgctgattgaatcagcgccccttttttaaattcgaagtatagcaaggctcttcatcttcatgatttagattttgtgtaaatagatgatcggcaatcgcaaagttaattgatccttttctgctaaatgtacagaaacagggagtcaaatccgcatcatgtgagatttccatagttgtctcatggcaaggggtgtttcacttgctcttgatgcactaatgaagggactcccaaaacggttgcatctgctgcttgaaaatctatttcatcttcaccccggccgggaatgtatcttacagtgacgcctttaagatggcaagtacatcatctttgttcagtttttggaaattgccgaatccgccgtattccatttcttttgcggcgatgtctgcgatcagctcaagcttgtcttcaccgatgtcataatccgcaaggcgggacggtgcgccgaggcttgtccagaacgcggacaatttatcgatcccttcaagcgcaatttctttatccgttttaccttcagtatcaatgtcaaacatgttgagcatcaggtttttaaaacggtctacatttgtatccagcgtgtatctcatccagttcgggaacagaatcgcaagtcctcccgcgtgagggatgtcataaaccgctgatacggcgtgctccatcgtatgggaagcccaatcgccgaaatagcccatttgcagcgtgccgtttaatgcgatcgtacccgcgtataaaatcgtttcacggtgcttatagttctcaaggtcttccaaaagtttcggcgctgtttcaattaccgtctgaaggaccgcaaaacacattctgtcctgaagcggcgtgttttcaacattgtggaagtattgttcaaatacgtggctcatcatatccaccatgccgtatacggtttggttttccggaacgctgaaagtattctcaggatctaaaatggagaaacgcggatgagtgacattgctgccccatacgaatttttcgtttgtttcccaatttgtgataacggaatcagggttcatttcagagcctgtcgccgcaagcgtcagcaccgtgccgaacgggagcgcgtcctgcgccgttacttttttgctgtaaatgtcccatgcgtcgccgtcatatttcgcaccggccgcaatcgcttttgtacagtcgatgacacttccgccgccgactgcgagaaggaaatcaatctcatgctttctgcacagctcaattcctttatttaccgtttccagacgcgggttcggttcaacgcccgcaagctcatgaacggttgcgccttcttcttttaagatgcctgttacttggtcatacaggccgtttcgcttaatgctgccgcctccgtaaacaagcagcacgtttttcccgtattgcttcagctcttttttcaattggtcgatttgaccttttccgaaaatcagtttcgtcggattgtagtacgtaaagttctccatttatcataacctccaaaaaaatcgtaagggaattactataacacagaaaaaaaggagctgccaatccagccgccccctttatgttattacaatgatgctttcagtatcgcaagcacgtcttctttctgcagtgacttgaactgtccaaatgctccgtttgccatcgctttatctgcaatcgtatccagcttctcatcagaaatatcataatcagcgagtctgttcggagcaccgaggctcgtccagaaatcagacagcctgctgattccttcaagtgcgatctcttcatctgatttgcctgtctcgtcaatatcgaagacacggacggcaagctgtttaaagcgggccggattttctttgagcacatgtctcatccagttcgggaacagaatcgctaaacctccggcgtgcggtatatcgtaaaccgctgataccgcatgctcgatgttgtgtgtggcccaatcccctcttgcgcccattgacagcattccgtttaatgcgatcgtgcctgtatataaaatcgtctcacgaagctcgtagttctccagatcattgatcagcttcggcgctgtttcaatcaccgtgcgcagaagcgattcacacatccggtcctgatacggcgtgtttggcgtgtggtggaaatattgttcaaacacatggctcatcatatcgaccatgccgtaaatggtgtggtctttcggaacggtaaatgtgtttaccggatcgagaatagagaatttagggtaaacgagcgggctcccccatccgtatttctcttgtgtctcccagtttgtgatgactgatccggagttcatctctgaaccggttgccgcaagtgtcagcactgttccgaaaggcagcgcttctttcggctggtgtttttttgtgacgatatcccacgcgtcgccgtcatatttagcgcccgccgcgatggctttcgtgcagtcaatgacacttccgccgccaacggccaataagaaatcgatgctgttttctttacagagcgcaacacctttgttcaccgttgagacacgcggattcggctctacgcctgccaattcatgtacggtaacttccgcttttttcagcagttcggttacttgatcataaagaccgctgcgcttaatgctgcctcctccgtatacgagcagcacgttttttccgtacggtttgatttcttcaggaagtttttcaacctctccctttccgaaaatcaatttggtcggattccaatatgtaaagttttgcatgacatctcctcctttggatttatattatgcagaaagatgacgttcaatgtaaagcaatccgcttttttgacggcgcatcacatggtttacagacatcgaattcccgggaaaggcacttgtacagcttgaaacagtgtgtgattttcacggcggagaatgtagtatgcatagattctttgctttgtcacaatctataactgtttcacgaattcatagaggaggttgtttacatgagtgttattcagcgtatctgtctcgtattaacgattatcggcgctattaactggggactgatcgggtttttccaatttgatttagtagcagccatcttcggcggccaaggatcagctctgtcgcggattatttacggccttgtcggcatcgccggcctgatcaatctcggcctgctgtttaagccgaacgaagaaacatcccgcgaggaagcggcaaatccggaagtcagataaacataaaaaaagcaccgaacatacatatccggtgctttttttaatgattattttttgataaggtctttgcggttggactgttcgatccactcttcaagcttatctttcaatgtgttgaaaccttgcggagcagatgtttcttcagaagcttgagccgctttcggttttcttggtttgctttcttttctttcaggcgccgcttgagtcgcacggatagaaaggctgatttttcctttttcttcgtcaaccgcaagtacttttacttgtacttcgtcaccgatagaaaggtgttcgttaatgtcttttacgaaaccgtgagtgacttcagaaatgtgaacaagtccttgagtttcttcatctaatgcaacaaacgcaccatacgcttgtaatcctgttactttaccagtgtaaacactgcccacttcaaattttgctgccattcataacaactcctaagttaaattaaatacagattatacgcaatttaaaattatatcatacaagtttgtttttcgcaaagagaacttttttacataatcatgtttaagcacagataaaggagggtatactatgattacgaaggctttctagtattcccccccttttatttggatgcgaaccgggttcgtatctttttttatgcccttttttcaacaaaccgtttgattctgacgagcgcttcctgaatctgctcaatggatgtcgcataggaacatctgatgtagccttcgccgctcgggccgaatacattccccggaacgacggctactttttcttcaatgagcagctgttccgcgaattcttctgaactcatgccggtcgactgaatggaaggaaaggcgtaaaatgctccgccggggtggtggcagccgagtccgatttcgttcaatgtctccacaatcaggtttcggcgtctccgatagcttttcttcattctttcgacgtcttcctggccgtttttcagcccttcaagcgccgcgtactgagccatggaaggcgcgcacatcatcgcgtgctgatgaattttgagcatcgcatccctgatcacgggaggcgccgccgtaaatccgagtctccatcccgtcatggcaaatgctttggagaagccggaaatgagaaccgtgcgttccttcatgccgcggatggcccccatgctcgtgaatggctcatcatacgtcagctcggcataaatttcatcggcaagcacgatcaagtcgtgtttttcagcgaaagcagcgatggattcaagctcttctttcgaatagacggaacctgtcggatttgacggcgagcatagaagcagcgcttttgttttgtccgtcagggccgcttcaaaatcggcggctgatgctttgaaaccttttgcagcgacagtctgaatcggcaccggcttcgcccccgtcaaggtcacgagtgattcatatgcgacaaaacacggttcgggaattaacatttcctctccaggattcataatggcgcggacagcgagatcaagcgcctggcttgcccctacagtaacgatcagttcactgtcaggtgaataactcaggccgaaccgctgatctaagtagcggctgatttcttctctcagttcataaagacccgcatttgccgtataagccgtataaccctgttctaaagaaagaatactcgcttccctcacgttccaggccgtcacaaagtcaggctctcccactcccagtgaaatgacgccttccatcgtagcggccagatcaaagaacttgcggatgcctgacggtttaatctgctgcacgtagtcagataaataagaagtcttcgtttccatttacggagacaccacgattcttttgtcatcgtctccgctttcaaagactttgccgtcatgcttatattttttcaggatgaagtgcgttgtcgtggaaacgacagactcaagggtggacaatttttcagacacgaagcttgccacgtctgacatcgtgttgccgcgaataacgacagataagtcatacacccctgacatcaggtacactgattcaacttcctggaatctgtatatccgctcagcgacttcatcaaagccgacatttcgttttggagtgacttttacgtcaatcatcgccgtgacgccttccaaaccgtcgactttgcgccagtcgatcatcgccgcataatcaatgatgactttttccttttcaagcttttcaatgatgcttttgacttcttcagcgggaatgtttgccattttcgcaatcgtttccgcatcaacgcggctgttttcgtctaaaatttctaatatttctgtttctttttcggtcagcttcatacgtttcacacctttgcattatcaaaaatcttcatgacattatatcacgattttcgacaaatgctaagaaaaacccgaaagaaaccagagctaaaatctgacaatcaaaaaagcctttacattacaacaaagaaaggacggcgaaggctctcatggaagctgtttcaccgattaaacgggccgcgatagacggagttgagctgtattacgagcattatgaaaatcccggcagacagacactcgtctgcgtacacggttttttatcttcggcattcagcttcagaaaactgatcccgctgctcagaaaccattatgatattatcgccgttgacctgcctcctttcgggcaatcggaaaagtcacggacattcgtatatacttacgcaaacctcgccaagcttctgatcggacttctggaaaagctcggtatcagccgggccgcactcatcggccattcaatgggcggccagatttccttatccgcgtctcttctcagacccgagcttttttctaaaatcgtcctgctgtgcagctcggggtatttaaagcgctcgcacccgtcgattatattcgggacgcatctcccttgttttgacctgtatcttaagtattggctttcaaaagacggcgtgctgaacaacctgttaaatgtcgttcacgaccggacgcttatcgatcaggaaatgattgacggttacgaaaaaccatttacagaccgccagattttcaaagcgatgacaaggtttatcagacatagggagggcgatttagagcccgaggatttgaagaaagtgcaaaaccccgctcttttaatctggggagaagaagaccgtgtcgttccggtctcagtcggaaaacggcttcatgacgacctgccggattccattctgtattcactcaaggatacggggcacctcgtacccgaagagcgcccggagtttgtttcggagcggatttttgaatttattcaataaaaaaaccggcggaaccgccggtttttaaggggtgcaggagctgctttcttttatgaacagaagctgctcggcggcctttcggcagccttcgatcggaagcttttgctcaaatgaagcttcaaagatatcctgaatggctgctgccagcttgtcggcacggtcttcactgtagacggcctgaacgatgtcgacggcttctgtctcataaaaatcttctccatatttaaacgggtcccacttggcaatgattttcatcatttccatgaccgcttggctttcttccattttcatcaccgcttataataaagtttgcaattctattttatcatagatacgctgtgcaaaataatgatactacaggagtgacatacatgaactttgatcttcgagaaaaccgtcttggcacacaatcggtgaaatgggacaaggcggaagcgttattcggcgtatcggatgcgcttccgatgtgggttgccgatatggatttccgcgctcccgaagcggtcactgacgccttaaaagcccgccttgaccacggcatattcggttatacgtctcctgacgaaaacacaagagaagccgtcgcttcatggcttgagacgcggcatggctaccggcccgcccccgcaagcatcgcgttcagtcccggtgttgtcacggcaatcagcatggccgtacaagcctttaccgaaccgggcgatccggtgttgattcaatcaccggtgtatacgcctttttatcagatgatcaaggaaaacaaacggcaggttttacataacccgttacgggaagaaaacggcgtctactgtatggattttgaggatcttgagaaaaagctgaacgattctgaggtcaagctgatgattctttgtaatccccacaatccgtccggcagagcatggagccgggatgagcttatgaagctcggatcgctgtgcgccgcccataacgtcaccgtcgtttctgacgagatacattccgacttaatgctgtacggaaagccgcatacgcctttcgcttctctgtctgaggagtttgcgcggatttccgttacttgtctcgcgccgagcaagacgtttaatattgccgggattcaggcatccgccattatcattcccgatcggtataagcgggcgaaattctccgccgtattgcatcagaacggaatttccagcctcaacacatttgcggttgcagcaatcgaagcggcctatacaaagggaggcccttggcttgacgcgctgattccttacattgaagggaatatgaaattggctgaggactttttaagaaaagaattgccgaaagtccgcatgatgaagcctgacgcttcctatttgatctggatggatttcagcgaatacggattttcggatgccgagctcaaagaaagaatgctcaaaaaagggaaaatcatattagaaccgggaacaaaatacggaccgggcggcgaaggatttatgagacttaatgtcggctgttcagccgccgccgtaaaagaagggcttaagagaatgaaagcagcgctcgcttagcagcggaaagaacgcctttatcagatgagataagggcgttcgctttagagaaatatatacttttttttccggtaaagatgttataatagattcatatttacataggaaaggatttcgcataaatggagattgtaaaggattacctgcttcacttctcttttattttattccctatttttctttatcaagtcttctggctcagcaagcccgatttgcttgtgccgagagcgaaccgcctgctggtcgccgtatttgcagcgtcatcttccttattatgtacggcttttcccatccaggagcttcattccgtccgttacggtttgcagctgattcccattatcgtctgcctgctttattccggtaccgccgcaggacttgccgcaggggcggcatccgttttttttcagctcatatggtttgaaccttccgctctttttttcttatccttaattccttttttaatcatcatccctatccagctccaaacgaaatggccttttttttcaaagcggaagaaactgcttttcgctcttctcatcggctgcactgaaaccgccttattaaccgcatctgtcttcatctattccgcgaccaatattttcaattttcaaaatctatcttccgtttattacgaggcggcagtatctgttttttttcaagtcagcgcccttttgctgtgcatttatttgattgagatcattgatgagaatgcgtccatgcgggcaaggctgattcactcagaaaaaatggccgtcgtcagcgagcttgcggcaagcgtcgcccatgaagtccgcaatccgcttacggtcgtcagaggttttgtgcagctgctgttcagcggcgagcagcttcaggacaaatcccactccggatatcagaaacttgtgctgtccgaactcgaccgggctcagacgatcattacgaattatctcgatatggcgaagcaggatgactatgaaaaagaaaagtttgatatttctctgctcgtaaaggaaacaggttccttaatggagtcttatgccaattttaaatcggtgaccgtgactgttcaaagcgagcctgatttatatgtgttcggcgatgtaaaaaaactgaaacaggccttcattaatctgattaaaaacagtattgaagctgtgccctctgaaaacggccgaatcgaggtctccgtccaaaaacaggaagagataattctcattcagattacggataacggaatcggcatgtccgatgaagaactgcagaaactcggcaagccatattatacgctgaaaacgaacggcaccgggctcgggcttaccgtgacattctcgattattcagcatcatgaaggctccgtctgtttcaccagcggcgagcactcgggcacaacggcctcagtcaggcttccggcgctgttcactagccaaccgcgttgatcttttatagaataactagagagaggtgaacgctatgaatacgtttgaaattggcacaatcgtaaaagggttttataaaacaggagcatacataggggaagtgacagacgtcaggcccaatcactatttagtgaaaattaaagccgttctgacgcatcccgctcaaggagatcttcatcatccgaagcaggcggatgttccgttttttcatgaaagaagagcgcttgcattcggggaacagacaaacataccgcatcagatggtcaaaccgtttgatggcgaggtgcctgattatacggcttctttacaagcggcgtctgcccggctgaaagatcagcttacagcggacggctcagaatgggcggaacgttcgctcgacaacttggccgcgttagagcgtgactattttaaacgaacttgacccagtcggcatgattgggtttttttatgtggcccggcgaaacagttcagtcagatcgacgcgatcaccgatcgtcggaggtttcggtttttcaagatattgtttatcccgctcgacaagcttgaataatttgtatgtcgtcagcgcatcatccagcgctttatgatgcgtgcccgtccctttatcgccatactcttctgccgctttccaaaggccggtcaatgttctgtcgccgaagaagtttttgtattcaagggacagatcccgaagttctcctttgaacggaaaagggatgtggttaaacatgcaattttgctttaacactttcatatccatattgccccaggtgacgatcgtacagtttttatcaggatcaagctcatttaatttgcggatgaattcattaaacgtgattccgccgtccacgtctttttgggtgatattcagaaaggttttgcatcgtttcgtcagcttcggaaattttttcggtttgatataactcgaaaacgtttcagtcacttcatcattcaccgtcttgacaatccccgcttcaataatctcgggaaagaaattttgcgggctgtattttccgtcaggcattgtaaattcaaaatcaataatgagcagactgcgctgatccacttttttacacctgcctttcctccgatcaaaaatgatattttatgatagtatatcagtttcccctctgaaactttcttcattttctaaaaataatgaattttcctatatccgcatcgaaaatacaaataccggattcattcctatatactaatgattagatacgcgaaaagtaaagaaggtgatgttatttctgtccgtaagaagaacttcgtcgtcatttggattacaaatttctttatttccgccagcatgaccatgattgttccgtttctttcgttatatatcgaaacgatcagcccccattcgggcgggtatgtgcagagatggagcgggtatgtgttcggcgtcacgtttttaatggcgtttgtgatttccccgttttggggaagattcggcgataagcgcggctacaaaaaaattctcttgattacaggaaccggcattgccgtcagcattttattgatggggtttgtgacatccgtttatcagctgtttgtcctgcggctgcttatgggtctagtaacaggctttgttccgacatcgcttgccatgatttcggcgcagacgccgaaagagactgccgggaagacgctcggcacgctgcagatgggtcaggtgtcaggcactttattcggaccgatgctgggcgggctgctcgctgacagcttcgggtttacgtacacattttttattacgtcttttgtcattttcgcatccgtgcttctcgttttatttcaggtcaatgagcagccgctcggcgagaaacaaaacaagcggaaaacctattccagaaaacaggtgctctcctatatttttcaccagcccgcgctttgggcgatgatggtgcttactatgatcgtgcagaccggcaatttcagcattcagccgctgctcgctttatatgtcaatgagctgcacggacctgttaatttagcttttttctccggaatggcgttttcagcgaccggactcggaagcttattgcttgcccggaaatggggggacttcggcgaccgcttcggccacagccggattttaatcgtgcttttgattgcctcagcggtgtttttcattccgcaggcgctcgcctcctccctctccattctgttagtcttcagatttctgttcggcatggtcatgggcggcacgctcccctgcattacggccgcaatccgcgtcagggcgccgggcagcatccagggagaggtgctcggctataacgtcagctttcgttttctcggaaatgtgctcggccctctgctcggaggtgcggtctcgagcggtttttccatttcggctgctttctacgtcaccgcctttctctttttaataggcgcggggctcttatggatggcgggacatttgcaaaaggatacagcgtcaaatgcgggctgaccggcagcgatcacgatttcttctaaatttaaccttctcgtattcttaaaagaatgatacgatatggctagaaatcaggagaaaagagagtgaccatggtacgtaaaataatcggatggattttgctgctcggcattatcccgttgtgtgcatttacagttattgcttccggcaaagaggtaaaacaaatcaagccttttgatcaggtgctcgataaacatattgatttaaaagcgatcaacctggttcaaaacagttacatgtatgacagggacggaagccttgtttctgagattgtcagcgatcatgagaaccgcgtgatcgtgccctttaataaaataccgaatgaggtaaaacaactgtttttaacctctgaagaccgtcatttttatgagcataaagggtttgactttatggggatggtcagggcggccgcctccaatttcaaagatcataaaattgatcagggcgccagcaccatcacccagcagctggcaaggaatgtgtatttaagccatgaacgcaccttcagccgaaaactgacggagctggcctattcctatcagcttgagaaaaaatacagcaaagatgagattttagaaggctacttaaatacgatttattttaataacggcgtatacggtgtcggttcggcggcacaattttatttcagcaagccgctgaaatctctcactttgggagaaatggcctttatctgcgccatccctaataaccctacattatatgatcctctcaagcattttgattatacgaaaaaacgacaagtcagattgcttaacggattaaaaaaagcaggcgttatatccgggaaacagctgaaaaaagccgaaaaggaaaagatcaagcttgatataaacgaaaaaacaaataaatatcctgactatgtttcctatgtaaatgatgaattcacacagcttgtttcatcatccgaaggctatgacaaacgtcttgaaaaagcttccggaaaggcgaaacaaaaaatacagagtgagctttcagacagagtcagcacattgttaaaagacggcgtgaagatttatacggcgctgaatccgtatatgcaaaaccaggttgtcgcccaagtgaatcaaaatctgccgtatgcaggcgtccaaggcggagcggccgtgattaatcatcagacacatcagattatcgcgctttcaggcgggaaagattaccataaatatgatttcaaccgtgcctatcaggcatacagacagcccggttcatccattaagccgctgcttgattacggaccttacattgaaaagaccggcgcaacgccacacagcaagattgacgcaagcaaattctgcagtgcggattactgtccgcaaaactacaataaccgcacgtacggtacggtcacgctggaaacggcgtttaaatactcgtacaacacaccggccatcagaatcatggaccgcgtcggcgtcaataaggcgttcagctaccttgaaccgtttcatttcgcgaagctggtcagcgcggattaccgtctgcctgcggcgcttggcggttttacaaacggcatgacgccgcttgaaatgaccaatgcgtacaccacgttcggcaacaacggcgtttatacgccgagtcacgcgattacaaaagtgactgatttaaaaggaaaaacgatattaaaatggaaagatgagccgacgcaggtattcagcgtgcggaccaacatgcagatcaaagaaatgatgaaagccgtcgtcaagagcggtacaggaaagaaagcgaactttaaagctccgtacgtcggcggaaaatcaggaacgtcaaatgactatcacgatatgtggtttgtcggcctgacggacgcttatacgatgggggtatgggtcggcaaggatacaccgtcaagcgtcgaataccttcatgacgcaagccctcagctttcgatctggaaaaacacgctgcaggcagcttattaaagataacggaggggatccgctttggaaccagctcagcttccggaccgcgtacttttgtttgacggcgtctgcaacttatgcagcggcgccgttcaattcatcattaaacgcgatccggccggcaaaatctcatttgcatcattgcaatcagataccgcccgggagcttttggcatcagaaggacttccgacagaacaatttgacagcatgatttttatcgaaaacgggcggatatacaaaaaatccgcagccgtgttaaaggtttcccgtcatctccgcggagcctggcggctgtcagcggtttttttcgcagtgccccgccccctcagggacagagcctattctttcatcgcccggcgccgctacaaatggttcggaaaaagggaagcatgcatgctcccctcccctgagatcaaaaacagatttctgtcttaacaaaaatggctagcttacacaggtaagctagccattatgctattataaagcttgataaagatgtacaaaataccgataacaaaagtaaaccaaaacagaatctcaagcaatataaaaccgatcagcgaaacgatcgagagtgtcgaatagattctgtacaccatgaaaatcaaataaacgagcgtaacaacggcaaataacgccgcaatccaaaaaccattctgcacgagcacaaaggaaagaattcctccgcctacataaattaaagagcctaatctgatttttttcagattgtccccttcagggtcatttgtgaaaaacaaaagagacagctctgtcactgtgtttgcaatcagcttcaaagccgaaaaaagcataaaatacacaagggcgaacgctgcaaaaagcgccagtctgatccctttctcagagaaataatccagcatcccctgatacatgccgagcgtctgaagtatcttcatgacataaagcgaggtagaaatggataatgacgaactaaaaagcagaatcgcaacgagcggaaaataacccgtccaataagtatttttcatataaaaagtccctttctgtaatctacctcacttattatggaggacttaaaacacattgacaagataaaaaataccatttttcctcacttttacgaaataagggcctgatcttcacaaaccggctttttcggagtaaagtagaacgcgggaatgataaacgtaaggaaggctgttatgaaaaaaacattaaaattgcaaacccgattaacgatattcgtctgtattgtcgtccttatcgcactttgtatcacctttttcacgatcagcgtccaaacagcagaccgcgtgaaagaagaagaacggacgaccgcgctgcgcaccgcaaagctggtcgcggaaacaccgagtgtcgcgcgggcattgcaaacaagaaaagggctgaaagagctccgggattatacattagacgtccagcatacgacaggaaccgaatttgtcgtggtgatggatatgaacagcatccgcctcacccaccccgacgcaaataaaatcgggaagaaattcaccggcggagacgaacagccggcgatgcacggacatatcaaaacgagcacatcagcgggaactctcggaaaatccatgagagccttcgtaccgatctatggaaaagataaaaaacaagtgggcgtcgtttcggtcggaatttcgcttaacaaaatacaggatgtcgtcagccacagtttgagaccgctttatttcatcatctgcgtaagtatttttgtcggcgtcatcggagccgtcattgtcgcccgcaccgtcaaaaacattatgtacggtcttgagccttatgagatcgccaccctcctcgaagagcggagcgccatgctcgaatcaacgaaggaaggcattctggcggttgacgcgcggggaaaaatcaagctcgccaatgcggaagcgaaacggctttttattaaaatgggtattccgactaatccggtcgatcaagatgtgaacgatattctcccgaaaagccggctgaaacaagtgattgaaacgaaaaaaccgcttcaggacagggatatccgcattaacgggcttgagctggtctttaatgaggttccgattcatctgaaaggacaaaccgtcggagcgatcgccacgttcagggacaaaacggaggtcaaacatttagcagaacagctgtccggtgttaaaatgtatgcaaacgcattaagagcccagtctcatgaattcatgaataagcttcatgtcattttagggcttgtccagttaaaagaatacgatgatctcggcacttacattaaagacattgccattcagcagaagacggaaacaagcgagattataagtgatgtcaaaagtccggttctcgcagggtttcttctaggaaaacaaagctacatacgcgaacagggcgctgatctggacattcagctcggcagcctgatcccgaatgcggcagatccggccgtcatccatgagctcattacgattatcggaaacctgttaaacaacgcgctcgacgcggtggcgcagatgccgaaaaaaaacattacgtgctcgatgcggtttcaggatcgccagcttgatatagagattacggacacgggagccggaatgtctgcggcagaccaagcccgtatttttgaacaaggttattccacgaaagggacaaaccgggggttcggcctctatttcacccagcaggcaacagaaaatttaaaaggccatatgattgtgacaagtgaaaagaatgaaggaacgactttcagtcttcgcattccgtatgaaccgaaggaggaaaatgatgattaatgtactcatagttgaagacgaccccatggtgggtgaattaaataaacgctatctcagccagattgaaggatttcagctgaaagggatcgcatcatcctttcaaagcgcgctgcacgtgctgagcgagcatcatatcgatctcatccttcttgacatttacatgccgggaaaaaacgggcttgagctattaacggaaatccgcaaacaaaatgaatcggttgatgtcatcgtcatttcggccgcaagcgagctggacgtcatcaaaaaaacgcttcggtacggcgccgtcgattatttaatcaaaccatttgaatttgaccgctttcaaaccgctctttccgactacagacgcaagcagaaagtttatcaatcacacagaagcatgacacagaaagaattggatgccgagctttttcaaaagaaagaagcggcggaaaaggttcaccttccgaagggattgacaaaaagcacgcttaaactcatctgggcgagcattgaatctttcggtgacggctcttttaccacggaagatctcgccaagcatactgaaatctcgcaagtctccatccggaaataccttaaatttctggaagacatacaagtgctgaatgtagagatggcgtacggcacgatcggcagacccgtcttccaatatcatatcaacaccggcaatgtcagcagcatcaaacaatatttataatgtcaaaaagcgccgttccgctgtgaacggtgcttttttactgtcatatcccgtgacaaaaggcttgagattccttttttgtatgctatataaggataatgacctggctgatcctcctctgttttatccagatgaggaagccgattcataaaattgatattttttaaaaaataagcaaatttctatttatttatggcgggtaaaatgataaattatgattggttagcagatcttttcagataagtcataagtcccgaacccggaagagacagccgctcaaggcgggaaaaagagagacgtctcatcattattatcagaaagttttttcgattctgcatccggtacggggactcaagtctgaattgaacggcacagccatattttacaggggggttatatctttgaaaaaacgcaaaatcggaatggcgatggcgctcatcgcggcggccggaaccatattaagcgcatgcggttcaagtgacaaagcaaacggctccggcagtaaaaactttaccgtcggcatggtaacggacatcggcggtgtcgatgacaaatcatttaaccagtccgcctgggaaggtattcaggcattcggaaaagacaacgggcttacaaaaggcaaaagcggttttgactatcttcaatcaaaatcagatgcagattatacaacgaacttaaataaattagcgcgggaacactttgacctgatttacggcgttgggtatctgatgcaggattccatcagcgaaatcgccgatcagcgcaaagacacaaattttgcgatcattgacgccgttgtcaaaaaagacaacgtggcgagccttacatttaaagagcaggaaggttcattcctcgtgggagcagccgctgcgctatcaagcaaaacgggaaaagtcggattcgtgggcggaatggagtctgaattgatcaaaaaattcgaaatcggcttccgcgcgggtgtacaagccgcaaatccgaaagcgaccgtcgaagtgaaatatgcgggcggatttgacaaagccgatgtcggcaaggcgacggctgaaagcatgtacaaatcaggcgttgacgtcatttatcacgcggccggcgcaacgggaacgggcgtcttcacagaagcgaaaaatctgaaaaaagaagatccgaagcggaacgtatgggttatcggtgttgataaagaccagtacgcggaaggtcaagtcaaaggcacaaaagacaatgtcactctcacatcaatggtcaaaaaagtggatacagccgtagaggacttaacgaaaaaagcaagtgacgggaaattcccgggcggcaaaacattaacctacggtttggcgcaagatgcagtcggcatctcggatcacaaggagaacctttctgacgatgtcatcaaagcaacagacgattggaagaagaaaatcgcggacggactcgagatcccttcaactgaaaaagaattgaaatccttcaaggctgagtaagaaccaggggataaggagacttccgtgcttatcccctctcttttatgaaaagagcggtgaaggaaaagctgcatctcttgcagcttttcttttgccaagctctttctcatcaaagtatctctgaaaaggagcgtcaaatcggtggattatatcattgaaatgcttaatatacgcaaggagtttcccggaatcgtcgccaatgatgacgtcacgcttcaagtgaaaaaaggcgaaatacatgcccttctcggtgaaaacggcgccggaaaatcgacactcatgaacgttttattcggcctgtatcagccggaaaaaggcgagatcctggtgcggggcgaacgcgttcacatcaacagcccgaacagagccaacgatctcggcatcgggatggtgcaccagcattttatgcttgtggatacctttaccgtctcagaaaatatcattctcggaaaagagccgaaaactttcggccgaattgacagacagcgcgccgcccgggacgtgcgcgatatttccgaccgttacggcctgcacattgatcctgaagccaaagttgccgatatttccgtcggtatgcagcagcgggcggaaatattaaagaccctctaccggggcgccgacattctcatttttgacgagccgaccgcggtgctgaccccgcacgaaattcaagaactgattcagattatgaaaaatcttgtcaatgaaggaaaatcaatcatcctcatcacccacaaattaaaagagattatggaagtctgcgaccgtgtcaccattatccggaaaggaaaaggcattacaacactcgatgtcgcacatacggatcaagatgaactggcaagccttatggtcggacgcgaagtgtcattcaagacggataaacaagcggccgatccgaaacaagaagtgctttcactttctgatgtaacggttaaggacgcgcgcggcgttgaggcggtcaaacagctctccctctcagtcagatccggtgaaatcgtcggcattgcgggcgttgacggaaacggccagtctgaattaattgaagccattacaggtctcagaaaaacgaatgccggcacgatcacgttaaacggcaaacagctgcaaaacatgccgcccaggaaagtcactgaagccggcatcgggcatattccgcaggacaggcataaacacgggctcgtccttgattttccgatcggagaaaatatcgtgctgcaaagttattaccaaaagccctactcttctttcggcatattaaataaacacacgatttatgacaaagcgcgaagcctgattgaagaatacgatgtcagaacacctgatgaatatacgcctgcgcgcgctctctccggggggaatcagcaaaaggccattatcggccgggaagtggacagaaatccggatcttttaattgcggcccagccgacgcggggactcgatgtcggcgcgattgaattcgtccataaaaagatcattgagcagcgtgacgccggtaaagcggtgcttctgttatcttttgaacttgatgaaataatgaatctcagcgatcgcatcgccgtcatctttgaaggcagcatcatcgcaaacgtcaatccgcttgaaacaaacgagcaggagctcggacttttaatggcgggaagtaagcaaatggaggcggggaaaacacatgattaatcgactttctcatctggctgtgccgctgattgcgatcatccttggattagctgcgggtgcggtcatcatgctcgccagcggctataatgtcgtaagcgggtattcggctctttggagcggcattttcggtgaagtgtattacatcggggaatcgatccggcagattacgccatatattttgtccggattggccgtggcattcgcatttcggaccggcctgtttaatatcggggttgaaggacagctccttgtcggctggaccgccgcggtgtgggtcggcgcttcctttgacgccccctcttacatccaccttccgctttcgttattggcggctgcggctgcgggcggcatttggggcctgattcccggatttttaaaagcccgtttttttgtccacgaagtgattgtcacgatcatgatgaattatatcgctcttcatttaaccaattatctcatttccgatgtcatgacggaccaccgggacaaaacagacaaaattcatgaaagcgcgtcgctccgctcgccgtttttagagcagctgacagattactcccgccttcactggggcattctgatcgctctgtttgcggcagtcctcatgtggtttatcattcataaaacaaaaagcggatttgaattccgggctgtcggctttaaccagcacgccgcacaatacgccggaatgagcgtcagaaaaaatatgatgtacgccatgatgatttccggcgccttcgcggggcttgccggcgcgatggaaggactcggaacctttcaatacgcggcggttaagggcgcctttaccggcgtcggcttcgacggcattgcggttgcgcttctcggcggcagcacggcaatcggcgttgttctggcggcatgtcttctcggcggccttaaagtcggggcattaaatatgccgattgaatccggggtgccttctgaagtcgttgacatcgtcatcgccattattattttgtttgtggcatcaagctacgccatccgtctcatccttgataaattgaagaaaaagggggcgaagtaagtggacttcctgcagattttatccattattgtcccggcaacactcgtatatgcggctccgcttattttaactgctctcggcggtgtgttttctgaaagatctggggttgtcaacatcggtcttgaaggactgatgattatcggcgcctttacaagcgtcatgttcaacttatttttcggacgcgagcttggcgccgccgctccgtggctcgccttggctgcggctatgattgccggcggactgttctcactgatccacgcggccgccgcggtttctttccgcgccgatcagacggtaaccggtgtggcgatcaatatgctcgcattaggagcgacactgtttatcgtcaagctgatctacggaaaggcccagactgataaaatcccggagcccttttacaaaacgaacattcccgggttaagcgatattccggttttaggaaagattttcttttctgacgtatattatacgtcgattttagccatcgtactggcctttgtttcctggtttattttattcaaaacgccgttcggcctccgcatccgttctgtcggggaacatccgatggcggccgatacgatgggaatcaacgtgttcggcatgcgctatatcggcgtcatgatcagcgggctgttcggcgggctcggcggcggtgtatatgcttccacgatcgcgcttgatttcacgcactccaccatttccggacaaggctttatcgctctcgccgcgctggttttcggcaaatggcatccgatcggcgcgctcggggctgcgctgttcttcgggtttgcacagagtttgagcattatcggctcgcttttgcccctgttcaaagacattccgaatgtatacatgctgatggctccttacattctgaccattctcgcgcttgccggcttcatcggccgcgcggatgcgcctaaagccaacggcatcccttacattaaaggaaaacgctgattgccacaaaaaaaagagttccgcaccctggtgccggaactcttttcatctatatacgattctgatatactcacgcggctgaaacggtgtttgcattgattcagccgcactcagcttgtcttccgcgtattccgcaccgagaaaaaaacgctcccaattatctgcctccgtctgctgccgcgttttgcagaaatcgtccgctatgaatgttcctgcaataatagaacaaaatattccaatacaggccgccgcctttctcttcatctgaccagctccttttttaaaagcttgatctgaaagataaatgtatatacaaagatcaggatatttgataaatttattttgggttcaaaagaccacaaaaacacagagaggaatacattatgccgtagcagggtaaaaaaaagtgcgatataatttgtactgggtcctatgaccgtgaattgattgattcactcttacataaagcagttgcttgatgaaaaaacaagcaaaggaggtcttctgttgcagctgttacatttcgcgattttggcgccttttttatttgcatttatcgttccctttctttataaacgggtaaaacaagtccatacaggctggtttgtgctgatagtgcccgttgtgctgtttgtttactttatcagcaagctccctgtaacaatggctggggaaaccgtccggtatgcggccgaatggattccgtccctcggtattaactataccgtttatcttgacggactcgggctgttattcgctttattgattacgggcatcggctctttagtgacgctttacagtattttttacttatcgaaggacaaagaaaagctcggccccttttatgtgtacctgctgatgtttatgggcgcgatgctcggcgttgtgctcgtcgataacgtcatcgtgctttatatgttctgggagctgacaagcctgtcatccttcttattaatcgggtattggcataagcggaagaaatcacgctacggggcggaaaagtcactgctgattaccgtcggcggcgggctgtgcatgctcggcggctttatcctgctgtatctgatgacggattctttcagtatcagggaaatggtcaaccaggtgcatattatcgcaggccatccattctttattccggcgatggttctcctgttattgggagcctttacgaaatcagcgcagtttccgttttatatctggctgcctgatgccatggaggcgccgactcctgtcagcgcctatctgcactcggctacaatggtgaaagcgggcatttatctgattgccagattcagtccggtttttgcattttcacccgtctggttttggacggttgcctcagtcggtctgatcacgatggtatgggcttcctttaatgcgatgaaacaaaccgatttaaaagcgattctggcattttccacagtcagccagctcggtatgattgtatcgatgctcggcgcaggagccgccgcgcttcattaccagcattcagagtattttacggcggctgtcaccgcggctgtgtttcacttaattaaccatgctacttttaaaggaagtttatttatggcggtcggcattatcgaccatgaaacgggaacacgggacatccgcaggctcggcggactgatggcgcttatgccggtaacgttcaccgtttcactgatcggaacgttttccatggcgggcctccctccgtttaacggctttttaagtaaagaaatgttctttacaagtatgctgcggattgctcatgcagatattttcagtcttgatacatggggcgtgctgttccccgttctcgcatggatcgggagcgtcttcactttcatctacagcatgaagctgtttttcagaacgttcagcggggcgcgcaaacctgatcagcttgaaaagacgccgcatgaagcaccgctcggcatgctgatttcgccggtcattcttgccgcttgcgccgtcagtctgttttttgcaccgaacgttttgtcttacagcctgattgaaccggcgatgaactccatttatccggctctgttaaccggcggagatacattccatgtccaaatttcccagtggcacggggtgacggctgaggtaatgatgaccctcggcatcatcattgtcggcacgatcggttacgtaacgctgtctaaatgggagcgtttgtacggtctgtttccgaaaaaactgacgctgaacaagctttacgatgcggtgacgggcagtatggaaaaaagatcttaccagctgacgtcatcttatatgaccggatttttgcgggattatctgctgtatatctttgcggcgtttatcattctcatcggaacggcgttcgtcacaaaaggcggcttttccatgacagcgaaaggcatggctgaaatcggcctgtatgaaatcgtgctgtccctcgttatggtgagcgcaacgattgcgactgtgttcgccaaatcgcggctgacggccattatctcactcggtgttgtcgggtacacactcgcgctgtttttcgtgattttcagagcgcccgatctggcgctcacgcagctcgtcattgagacgatatccgtcgccttgtttcttctttgtttttaccatctgccgaaaatgcggcggaaaaagaagacaagaacattccggatgacgaattttatcatttctctcggtgtcggcgtcatcgtgacaatgctcggaatcgcgtcttccagcgaaaaaacaaaagacagcatctcctcctttttcaccgcttacagccataagctcgggggaggaaacaatatcgtcaatgtcatcctcgttgatttcaggggatttgatacgatgtttgaaatcacggtgctgtcgattgccgcactcgggatttacggcatgatcagaacaaaagtaaaagaggagggagaagagcgttgagacagcaaaacacaaacgacatcatccttcagacggcaacgaagcttgtatcttttatcattctgcttttctctttctatttatttttatcggggcataacgctcccggcggaggatttgtcggcggactgattacgtcttcggccatcgtgctgttgcttttggcctttgatttaaaaaccgtcaaatcgattttgcccgtcaattttatttatgtggcgggcgcgggtctgcttatcgcgattgcaacgggtgcaggttcgttcttattcggagcaccctttctcacccatacattcggccattttcatctcccggtgcttgggaatacggagcttgcgacggccactttgtttgatttaggtgtgtatctcgttgttgtcggcgtgacgatgaccattattcaaacgattggagaggaagaataatggaaatcttaatgtctgtcattgccggtattttgtttatggcggcaacctacctgctgctttctaaaagtctgctgcgcgtgattatcggcaccgcgcttttaagccacggcgtccatttgctgcttctgaccatgggcggactgaaaaaaggcgctcctcccatactgggcggaaaaagcacgtcgtttgtcgatccgctgccgcaggcactcatactgacggcgatcgttatttcgttcggcgtcacgtccttcctgcttgtgatggcgtttcgcgcctatcaggaactgaaaacggacgatatggatcgaatgaggggaaatgatcaacatgaataactttgtgatattgcctattctggtgccgctgcttgccgcagtgctgctgatttttatgaacaggcgcgtgatgctgatgcgggtattcagcactgccgcttcctgtgtctccatcgtcatcagcgccgctctcgttcagacggttttcacacacgggattcagacgctgacactcggcggctggaaagcgccgtacggcattgtgctcgccgcggatcagcttgccgcactgcttgttttgacaaccgccataatcgggctgctcgtcaccctgtactccttccgctccatcggagaaaaaagggagcgcgctttctattattcaggggtgcagtttcttctggccggcgtaagcggagcgtttttgacgggtgacctgttcaacatgtacgtcttttttgagcttctgcttatcgcgtcctacatgctgatcgtgcttggcggaacgaaaattcaattaagagaatcattgaagtatatcgtgtttaacattgtgtcatccgcgttttttgtcatcggcgtcggttacttatatgcggtgacgggcacgctgaatatggctgatctaagcgtgaaaataagtgaatcgggccagaccgggctgatcaccgtcatcggcgtccttcttctcgtcgttttcggtttaaagggcgggatattcccgctgtatttctggatgccgggctcttattacgccccgccggctgcgatttcggccctgttcgggtctcttttgacgaaagtcggcctgtacgccattttaagagtattcaccctgatctttattcacgatacgggctttacccaccaattgatgatgtggcttgcgatgctgacggtgttattcggcgtaatcggatctatcgccttttcggatgtcatgaaaatcgtcatctacaatattattacagccgtcggcgtgattttgttcggcattgccatgaacacgccggcctccattcaaggagcggtttattacttgattcacgatatgctgattaaaggagcgctgtttatgctcgccggcacgcttatcgcattgacaggcactgccagcctgcataaaatgggcggactgatcacccgttatcccgttttgggatggatgttctttatctcagccatatctctggccggcatcccgccgttcagcggatttatgggcaagctgaagatcgcggaaggcgggttcgataagggggaaactttgttttccgtattgattctcttatcaagcctgcttgtgctctattccgtgctgaaggtttttacgacggctttttggggggaagaaaaagaaatcccgggcgccggcagacggtccgcaaaaggacttctttatccggcagccgcttttctccttttgtcgcttctgttcgggctcggaaccgaatgggtttcaccgtatgtcaatcagacggctgagaatctgctgaatccggaaaaatacattgaagctgttttgaaggagtagatggcatggcttttcaactattattaaatgttcttctcgctgtttgctggatgtttctcacaaacagcctcagcgcggcgggttttatgaccggatttatcgcgggcttggcggcgctgttttttttccggcgcttcttctcgcggccgttttacatttggaaaatatggtcagtcatcaaactggcgctgatctttataaaggaattatatttggccaatgtcagcgtgctgaaaaccgttatatcgccgaaactgaacatccgcccgggcattttcgcgtttaagacggaattgacggaggattgggagatcacgctgctctcgctgttaatcactttaacaccgggtacgctcgtaatggatatctccgatgaccggtcgattctctatatacacgccatggacattgaagatgcggagaaagcgatccatgacatccgcgtctcttttgagaaagccattcaggaggtgagccgctgatgtttacgtttattctgcaattatcactcggcattatggcggtttcgactcttctgtacgtcattcgcgtcataaaagggcctacgataccggaccgggtcgtcgcgcttgatgggatcggcattaatctgattgccatgaccgcgcttgtatccattctcttaaacacatcggcctttttggacatcattctgctgctcggcattttatcgtttatcggcacgattgcctttgctaagtttttggagaaaggagagattatcgaaaatgatcgaaatcgttaaatgggccgtcgccgtttgtattctgatgggatcgctgatctgcctggtcgcgtctttcggcacactcaggcttcctgatgtgtatacgcgcgcccacgcctcttcaaaaggctcgacactcggcgttaatttggtattgctcggggtgttaggctacttgtggatgctgaccggagaaatttctgtaaaaatactgctcggcatcatttttatcctgctgacggcgccggtcggagcgcacctcatatgcagggccgcgtacaattcgggagcggcgcttgataaaagaagcgtacaggatgattacaaaggaatcagaaactttgtgatcaaacgaaaagaagattcatatttataaaaacaaacagccggacgattcagggttccggctgtttgtttattttgttataacagccagtgtgcagcgggaaacacagatcagcctttcccgttcatcgaaaatgttaatctcgtacacaatggttgccctgcctgtgtgaacgggtttcgcaatcgccgtgaccgtcccgccctctttcacggattttaaatgattggcattaatctcaagcccgacacacgcctggttcgaccggtcgataaaatgctgggccccgacacttgcaacagtctccgccagcgctgctgacgcgcctccatgcagatatccgaaaggctgcaccgtcctcttatccaccggcatcaccgccacgcatctctccggcgtgttttcagtgatttcaataccgagtgcgccgagcaatgtattgttcagattcataggtcattctcccttcaagatttatagtacgttatctgacttggcgatcagcaccgcttcagttcgggagccgacattcagcttgttaaaaatggatgtcaggctgtattcaattgaccgcttgcttaagtgaagcgcatctgcgatttcctgattggtcaaacctttttcgacctcttggagaatatgtcgctctctcggggttaaccgatcctgctcactttgaggggaagaagacgtttttgttttttgctgggtcatcagctgtttgaaataggagaaatcaactaaaatctgtccgttgagcacgtgatatatgtattgcatgattttctctttagattcggttttgctgatggcgccatgcaggcccgcgcggatggattcttcaaaataatcttcaacctcatagcctgtgtagacaatgattttacagagaggattctcttttaagattttcttggaaagctctatgccgctgatgtcatcacccagatttaaatccattaatatgagatcgtaagctgaaaaatcatgccggagaacgaattgttcactggcatcaggactgaggcaatcgacagaaagattcgtgtccgtttccagaatcgtcttggtgccctccatgacagccggatgatcatcaatcactagtatctttttcatggtttcctcccttttactcactcatttccattttattaaaaagacttggcttctgccaagtcgatttggtgataaattggttacaattccatttcaatatctactttaaaaccgtttccttcacttgtgtcgattttcatccgtccgtcaagcgcacggacgcgctccttaatacccgaaagacccatgctcatcgactgcccgccgccttcttcctgattgcatccgacaccgtcgtcttcataatgcagaatcactttattttgaatgctgatcagcataatcagcacctcattcgcctgtgaatgtttcatggcattcgaaagaaattcctgaataatgcggtacaaattcagctgcgtatccaaatccagcgccgccgtaaaccggcccgtattcagacggatatgaaacggcgcacgctcctgctgctgtgcggcaagcttggataccgccttgaccaggcccaaatcatacagcagctgaggccgaagctcatggcacgtctcccgggtcatcaaaatgacatcggacatctgctcattcatctgatgaagcttgtcctgcacctctaactggcaaggctcctctttcttaaaatcggccagaaacagctcacactggcgcttcaaagaaatcaagtcctgcagcactgaatcatgcagatcacgggccaaatccgaacgctgcttttcctctatcgtaaacatcagcttttttagccagaccgggtttgagccttgttgttttagatcttgtaaatggttcatgagttcttcgatctgtatcacattttccatagagacactcgtatagaaagacaatgtcttcagccatgaaatctcatctcgtgtcagtctcggtgtattaatagtggacaaacaaagcaaaacataagaacttcccccgcgttctcctatcttgattaaaaaaccgcggtttagctcaatgatttttccaatctctgaagtaactttcttaaattcttttgaatacatttcccagtcaggctcattatcctttttatcatgatataaaatgtcaccctcagaggtaacttcaaagacataagctttactgacaagtagaacatccagaatcgtctttttcagttctttaaacatttgttttaaagatgttatgcttctgataagctgagtatatttgaatatactatcttgataattaaatttttcagaaaaacgttttaaccgaaatttaaaatctattatttctttaaagtaaaatacagcaaacattacgataaagatgaaaacagtctgtctaataggattcatttgaagcgcatttgttcccgcccagaccgataaaactccgacaataactagcgttgggattacagccagtaaagtataatacctcattcttcctaatataaattctatatcaaatattttatttgcaacaaactgatatactaatccaaatgggataaggacaagcaatgaggctgatgccagtgctggaaatatataatcaccagttaaaatattaggtgcgacgtaaaaaagtaaaaatggagcaaaagaaagtgtatttgtcagaattaaaactttcaaaatataagcatgctctgaatatttatatttatataagtgatagaacacgagaacaaaacctgaaagagtaacgagaaaaaacgagataagattaaggtttgttataatgttttcaaaaggtaatttcttacggaaaaattccaggataatattaaaaatcggaaatatatataagaaattgattagacgatttgcaaacttctttcctaattcctcaaaatattgttgtatgaactgaagataaaatataggagaagctataaatgtgaacaaattgacatacctgttaaatgaatgtcctctaaatggtcctcctgcgcttatataagcaattgaaatatctaacaaaaacaaaattaaaatgtatcccgcaaacgattttcttgtttgattcacctttagaatgtaaaatatacatactatacttaaaaaataaaacacaagtggaagaacgaatacaaaaaagctataggatttgtctaaattaacaatatcaaaatcatctaaatgaatttgctttccatttctgcttacatctaaacttttgatatgactaagattatctccttttaaaaatttagcagatggtttttctttgttgatttttagaatgatgtcacctttttctaaacctacgaatttcccgtaagtagtttctgacatctctattacttggaattgtttgtttttattttcaataacttttgtcccgattataatcccatttatgtttatatatgaaacatagcaaacataaacgaggcttaagataatgactgaaatagtgaattgtttaataaagtttttcacatattacaccaccgaacattcatcctttttcccattgctctatttttccatcgtttttcacaattgaagattcttcaaatgaattgattaatatttgagtaatacctgaatcatagcctaataaacttgcttcattgacttttaatttttttaacacttccggatatttcaatatataattgatcaaatcctgcattatacttcaatccccctattaactacatattttttcaatttatctattttactggtttcaagatttagtttctctatagcattttcacatttttgcttatacaattggtgtaaaactgaaacatactgagtaacacctgcatcagttaatgtctgaataaaattgtttttatcagatataaacttaaggtgtgtttctctatgagaaaacatacgaaccaatttttcagaaggctcgttaaacagcctcttaaggtacaagttgattaacgtgtgtttatcttttaaaatatcactgcgtttagagctgaaaagagccagataatcactatatatctgttcaaacattcctttgtaataggaatacgtttcaacagtttcattatactttccagttgctaacatagtacctgccacattggatagagcgaatagactcccgcattttaatctaatgacctctaaactttcatcttctttctctggcttattgattatatcatcgtgttgtccttgcatagcgtcttgtgtatatttcagtatgtaagaaagaataaaaggattcatgttaattgaattaatcccctgcagccctgctgtgtataatgaaaaagctgcgcttaaagcttctgaacggtctatcttcatccaaagagcttgtttgttatcttcatcttcaagatcatcaataatatcggcggaaagcgtaagaatttcaattcccgccgcaagtttctcagcagtcttaaaatcccttccgccaaaaacttcataatgcaataaagcagattcagcaaaggttaaatattttctggattcaacaaacccaagaagaagctgtagtaaatgttgattgaatatgttttgctctattatactcttcattttattcttgatttggttggcatctaaacacatttgctcaataattgtcttcaccctcccattctattttactaaatgcaggtgatgaaagacagcaggtttttcgttttttaacaatcgtataatactttatccatgaaatggataaaaaatgcacaaaaaaaagacttgtttccaagtctttttaagaaattttcattgcatatgagaatttatcgagctgatcaatgcttttgttaatgtttcgtaatgagtcggttgtttctctgatatcattttcaagtcggaataataattgctttacttcttctaatttgttttccaccgtttccacactcctttttttgaaagatcaatgaattgtgtatggtgaacgagtcctaggtatttgatctgttactaatagtgtaaacgtttttgcgggatttttcaccgaaaagtatgtgtaaaagtatctgcgtgacaccgcaaaccgaggtaatcccatagtcccgaacagagcatttagcgaacaggactatataactaccagaaaggcagacgtttaggatgaagcagaccaatctggcggttctgctgtttttttaacggttttccgacaaaccggcaaggactatagtccctgccgtcgcaatttcaaaacagaatgggcgaacagcgtcgcataaccaccgacaaacaccgaaaagaccgcaacccccgcattgtggtcttttgcatgtcataactcgttatcacgccgcctatactcatatataacgaatgttttctcaggaaggaggccgccgtatgcattatgtgtatccatgcttccctgttttcgccgcgccataccggcatcctgcgcccagtgccccggttcacgcagatattttgacagcgtccgcaaaagaggctgcgggcatgctggaggatgcccgcctgctccttacgcggctgtcggcgtcaaaagagcttgcgcgccgtatcctcaccgcagcgcaatcatctgacaccgcagcggtcaagcggctcattaagcagaccggcatcaaaactgactttgacgtgacgtataatcccgacggcatccgtgtcagtctggtcagagagcaaagccggtttatcatcgccctcaggtggtcggcttaaagcggctcaatccacgatcagctgccggcaccattcgatcgcctgtaagtaacattcatacgcttcttctttgttcagttcttttccccactcgtcacagtcccagttgttgcattcaatggctttgacgaacgcgagcatcttataataatcgttttcataaccgagcagcgcctgtccgacttcatcgattaaaggcagttctttgatgatatcctccagctccctgtggagaagcgtatcgatgagcgaaaacatgccgatcagcatgtaagaagagggctggggccttccggttcttttcgccagcagttcgcacagtttggccctgattaaggaaatcttaatgatttctttttggcttgagtggcttttcgccgttaaatctctgaatgaaagaatgtaaatcaagcgcttaatctcattcagcccaagcatcatgatggcctgctggatgctgtctatcttttttttcagccttgtttgcgatccgtttaaaaaacgcagaatctgatacgataagctgacgtcccgctctatgtattccgtcacgcgctgtatattgggctggtcattgtttaattcgcttaaaagctggtagtaagaatgaaaatgaaacgtcagatcatttccgctgatgacacgcggttcactgaaaaaatatccttgaaacaggtgaaagccgtctatggccgcctgtttataatcttttctcgtctccactttctccgctaaataaatcagacttttacagctgtacgtctgaatgatttttttgcgctccagacgcgaggattgcaaaaaatcgatttttaaaatatcaatatatttcatcagctgttccactaactcttcattttccggattgatggcgtaaaaatcatcaagtgctaatgtatatcctaatttcttcagctgtctgcatcttgagatgagtgccggagtgatcggtatgtcctcaagaatttcgataataagctggtcaggatcaaaggaggtagggagatctgaaaacatcaggctttctgtaaaattcacaaagcagcgtttcccctcagtcagcttttcgattccgatgttgataaagctgttaataatgagatccgtcgtagctttatctccgtcagcggccgaataacggttctcttcgctctcccggtaaagaagttcataagcaacaacctgttcgtttctgttgaagataggctgtctcgcaacaaacaccttcattcatttacccccttagatgcggccttcgaacataagtatatcaaataacttgacgaaatttgtctaaatgtgaaaaatattatcacaacaaaaaggcctttccagagaaaggaaaggccgctttgtcttctattcaagttcccgtttcagctcgcttttgatttcatgaatccgctgcatcttgttgctccagcagtcttcgcttaaatcgaccggatattcttccggcttgctgatccgtttgtattcctcccacagaagtttgaggttatcctgcacgtattgctggatgtcggtaatttcgggattatcatagcataaaacgccgttttcaaaaatcggctcatgcaggtctttcgcatagaaatcagtgacgaatttgctgacgaacgtgtggacgggatggaacatttttaagcgtttctgatcatttacccgctcgtcataaagcgcgatataatcaccttccgagtggtgattcagcttgttgataatccggtatactctctttcttcccggcgttgtcactttttcagggtttgacgaaattttaatggtgtcggtcagtttgccgtcctcttcaatggcgacaagcttgtaaaccgcgccgagagccggctgatcgtatgcggtaatcagcttcgtgccgatgccccacgtatcgattttcgctccttgcgatttcagatttaatatcgtgtgctcatcaagatcgcttgaagcaatgacctttgcgtctgtgaaacccgcttcatcaagcatttcacgcgctttttttgacaggtacgccaagtccccgctatccaggcggatgccgatgaagttgatccggtcgccgaattcctttgcgactttaatcgcattcggcatgcccgaacggatcgtatcgtacgtatctacgagaaatacgcagtctttgtgggtctccgcatatttcttaaatgccgtatattcatcgcggtacgcttgtacgagcgcatgagcgtgcgtgccggataccggtatattaaaacgctttccggctcttacattactcgtcgcgctgaagccgccgatcaaagccgctctcgctccccacatagccgcatccatttcatgggcgcgccgcgttccgaattcgagggcgtcttcgtcaccgacaacgcctttaatgcgggctgctttcgtggcgattaatgtttggtaattcacaatgttaagcagagccgtctcaatcagctgggcttcgatcaggggcgcttcgacccgcataatcggttcgttgttaaaaacgagctcgccttctttcatgctgtaaagagatccggtaaaagaaagatcccgtaaatactcaatgaaatcatcagcatagtgcaattccgtttttaaataattcagatcgctgtcggtaaatttgaagttctccaagtattcgattgctttttctaagcccgcaaataccgcatagccgttttcaaagggaagctttctgaaaaaaagctcaaaaatcgcttttttctcatgaatgccgtctctccagtacgtttcggccatattaatttgataaagatctgtatgtaaagacaaactgtcgtctttaaaaccatgctccaccaaaattgttttccccttccttactctgccacttgcgctccgatgctgttcttaaaatgggacagggcccattcatgcccttccggattaaagctggccacagcgttttgatgaatgacgatctgaaagcccttgttgtaggcgtcaaccgccgtgtgaagaacgcagatgtccgtgcacaggcccgcaagatgcagctcagtgatctgccgttcccgcagtttcagctctaaatccgttcccgcaaaagcagaatatctcgttttttccatataatttacgttttttgcgtgtttatgtttctcataaagaggcgatagccttccgtacagctctttgccctccgtgccgttgatattatgcggaggaaacaggcgtgtctcgggatgaaaatcatcgtctgcatcatgcgaatcaaccgcaaagacaacgtaatcaccgttttctataaatgcttgcgtcaaactgacaatcgtatcttcaatctgtctcgcgggttctccgcaggttaatgccccgttctctgctgcaaaatcattcgtataatcaatgcatataaatgcttttttcatagccggcctccccgccattcatatgaaaaccattatatcctatctccacttgtaagtgaattggcattgtaaaatgacaaacggtgttttgcccttttaagatttcaggagtgagcgctgaaaaatgtcatcctgtacgtaaatgccgtcaaggttcacggcataatcggcggcaaaaaccaggccgagcggcgtttcgaattgaagatccgatatgacggagcttcggacaccggcaagtgcggcaagcttcatatatggtgaataagcatgatacgggagccttccgtttatatagagcaccgcgtcttttcggcttttcagcgcctgtttcacttcttcatacggctgcttttgcagcacctgccccttcgtcagggcaatgatgactctttcacgcagcgagcctaaaaataaatggcgttcatccggtttcgtctgcagagggccgtacatcccctgctgtaaataaaggtcaaccgttttgtcgctcatcggcctgtccctcctcagcttgttttacaattatcgccccggacgggacgcggtaaaccgcttcgttacatttcagccacccaatgggagatcttgccggcgagctctccggcgggttcttcttcaatcagcttgctgaatgattgtaaaagccgctgcgccagcgcctttttctcttcctcataggaaatgatcgtgctccactcaagttccggaacggctacaagggtatgctgttcttttttattttcatgcagatatacatcaccgatcattccggactgcacggtaatattcgcttttctgattttcataaaaaattccccttttataaagactgattctattatactacaaaaaagcgacagcctcctaaaaggaggctgtcacgcgttaaaccaatcaggttcgtcaaacacatcgatgtcttcaaagcgcgttttgctgaatttattagtaactttgacaaaatctccggaatgaaacgcccctgcccccgcgcctgagtggtcaacggctttgggagaaatggcaaacacgtcaccgaagctcgccgcagcgtctccggctaaactcataatataaatcggtcccacaattgcaggcatacccacacctccgcttttctttacagcattttatgcgctgcatcgggagttgtgcccgtttttatttcggcttgcggctgtcttcgagctttgaccgctgacgaagtttgataagccggacgatatttaagacgaaagcttttaaaaccgcgtaaaccggcacggccagaatcattgcgagaatgccgccgaaactgcccgctccgataagcagaagaataatggtgagcgggtgggtattgagccgtttcccgatgacaagcggagaaagcagattcccgtcaagctgctggacgacaacgacaacaataacggcaaacagcgccttagccggcgaatccataaacgcgataatcaccgcgggcgccgccccgagaaacggccccaggtacggaatgatattggtgacggcgatcaccatcccgagaattaacgcatactgcaggccgatgatccaatatccgataaagcatgccgttccgacaaagagacaaatcagcagctgtccttggaaataggcggccaatgtgacatataagtcattaaatattttgcgaccttccgcccggtaggaagtaggcaggattttaaccgccaagagcggaaaccgccggccgtccttcagcatataaaacaaaatgaacggaacggtgatcacgacaagcgtgatattcgtaacgacgccgaacacggccgacaggcttgccgtaatattttgcggaaggctttgtaaaaatcccgtcagagactgctggattttttctatcgacacataatcctgcgtcatcatccacgtaaaccatttggaatgggataattgcgccgtcaagacttgaatctgatgaatgtaatcagggaaattgttaatcagccccgtgacctgggaagccacaatcggtccgatggcggtgaacataaaggcaatcaggccgatgaaaacgagataaatgagcaggatcgccaatgtccgggggatttttttctcaagcaggcgcacgatcggattaaaaatgaaaaacaaaatgcccgagatcaaaatcggaaaaaacagagtggtgataaaaccgaaaaacggctgaaaaataaacgagactttcgttgatacgtaaataatgagcaaaacgagcaaaatttgcagcgtccaaaaatggacctttgatttcaacaagcggtttcctcctattgtcatgtgaacttgtactgtgattgtaccaaaaaaagccgccgtgcatctatgtatctcaaaaaagaagacgcaccggggttctatagggccgcctccggtttgcgccttattcgggctgttacacgcgttcggtataatcaggcatgacggaaaccacatggcggtttctgatataaaatacacggtcatgcgtttcttcaatggcgatgtgatccggagtggcatcaatcagccgtcctctgacaatgcgtctgacggtttgaatgataaaccttgagccgataagcttatggatggtctgataaacgtaaggatccactaacgagacgatttgcgggcttccttgatgggccattttcgctgatcccctttactatgttttccttcagcatatgcagcggacaaaggctttgacacagtacgtctatcggagcggaaaaggtgttagtgagcatgcggagttatgtaagcggaaaaggccgcatgagtggcctagactgagcttcttatgggatattgggcttggtcaattaactgatcaagcttttggatttgtttgagcgcggccgtgtgatccatttggcggtaatggtgatgtccgccgggttcttcatcgagttcatccgcttgtttcacgatttgctggagcgtattcttgtccagttcgccttcaggcagataggaatcggtgtgaagcagaatcgccagcgcaatgtccttcgccgctttcggttcttcaccgagccggatgagcagcttatgcgcccgttccgcgcctttaatggcatggatatcgtttcttctgtacttttcataatcccatttgccgtctgtgtaccattcataatggccgacgtcatgcagtaaagccgctttcgccgcaagatccgggctgacacctgcttttacggcaagacggtatgcatgaaacgcgcaggcgatcgcatgggcgacaccggaacgctgtaaatacttttgtgcgattggatgggtgaagacatccattaacgttacatttctcatggaaacccctccttaatatatttttagaatcctaacataaatcgagaagaaactcaattcatctgatacatttcttataccccttatatgttgtttcattcatcatatgcggccggaccccgaagtgattgtacaaacaaaaaagagcagcgtgaacgctgctctacaaaaattctttaatctcgtatatccgtccgttttccggctcgcccgcgatcagtgagtgaatgacgccggcgatgtattcaggacttctgaggtttttcgtttctttcagattgcggaaccgttcgatgtcatggaaatcttcttttgacgaagaacggatgacagcctgcatgtctgtatccatcactcccggcgagaatgagatcatgcggaccggcagctcttcatcttcctgttcaaacccgaatgttctcgtaaacatatcaagccccgcttttgagctgcaatacgcgctccagcctttataaggatttttcgccgcgccagatgtgatattgacaattgttttgctgccgctgaacgcttcgaaacgctttgtgaacatttggctgagcaaaacgggcgccgtcagattaagggtgtagtgacggttcaattcttcggcggaagcctctttcgcccgcttgatcggttccaccatgccggcattgttgatcagtgtgacagcggaataccgcttcttctcagcttgatcaagaatcgccttcatctgccgctctgtatctgccagatcggttaaatcaacactgtattctgtcagcccctcacgcttttccccgcttatcgttcttgaaagcgcggcgacttcggctccttcttgaagcgcctgttccgtaagcgcccggcccaagccttttgacgcgcctgttataagaaaaaactgcatgaaactcctcctttttttcttattttacgggctgtcttcccgcaaacacaagcgattcgtttaccgctttgccttttcctgcgccgtgactttcgggatcagatagatcatcgccgcaatcccgaggaggatcaagacggcataaatgacaggcagcagataagaagtctttttctcttccgtctccatatctgccgaggtatgccgcaccgcaggctcggcaaatgtgatacccagttttttcgattgcgctttgatcgtattcggctccgtgtctgacgatgtaaacaactttgatatcagtttgtcatccgggttttcggccggctgatcaaaggtaatatccttctgttctttcggaagcgccgttttttcctcagagtaggcatcgtcgtgcaggtaatccgtacgaatttcaatgtctttcttttcatattcattcggcttgacatcagtattttcctcattcgcggctgcggcttggggaaggaggaggaaaaaggagagagcaaacagcagcaatcctttttccatgaacgtgttacgcctcataagactgatcactttcctccgttttttccgcaaacagccgaatgacgagcggaagcgccgccgcaatcagcgtaatgatcgcaagaaccgttacccccatcgcaaacagatggcccgttccgtattgaatatcgatatagactttcgaaaccggactgtcaaaggtgaagttcggcataatcaggtcgatcaaaggcgccacataaaagagaatgagcgctgatgatgcgatccatccggtaatcgagccgaagacaaaggctgcccggataaaagctgaactcgccgcaagcaagagaatcgtaaagactgaccatttaatcgtctgatcgtccggaagcgagtagatattcagaccgaacagactgatcatcaatccgaccataatgtttaaaatcccaaagagcgcgcctttgacaagaagcggcgcctgctgataatacgagctgaaatagccgatcagaagactgctgatcaggacgatcaccaaaatgacgaccggcggaacattctgaacccggtcttccggcacctctccgctgattttaagcgggttggcgagataatcgtaaacgtagccgttttcctgtccgtcaacgagcgcgttccctaaaatgccgtacacgtcatttctgatcaatttcgtggaatcgacgtttttgccccagttgctgttcagggtgtccgctttatgctggacgtcatttacgctttgctgcatattgttggtatagctgatgatgccggactggcgttctgacagatggcccatcgtgtcagacatttgcaggacttcgcggccgacggtatcctgagcgccgagcgccatcgttccggttaatccgtctccgctgaacgcggccgcttcctgcacagcgccttcagccagctgatcggatgctttcgccgcgctgtctgaaatgctggcgagctcatcgagcactccggcttgttcatctctgatataggtactgtagttatccgagaattcggtcatgcctttaatgaaattgctgatgtcttcatctgtctgcattttgttgttttttagattttcccagcttgctgtttcttccggtttgatggcgagaacggtttggacttcgccttgctgggctttcagcaccctgtttttcacatcaggcagcgggcccgcgtcaagagagtgatagagtgtcgcctcatacagggataaatcattatagtaactcattaaatcggatatcttttttgtattaatgtcagcggcaaatatctgttcaagagcagatttgcggccgccatccaatgacgggtagttcagaatgttctgttctgttcttacaatcattctgtaaacggtattgaagtcttgttctctcttttcttctgattcttccagctttttctttaatttttctgcgcgttttttgacgtcatcaatctggtctttaaggccttggatttcttcatcaagagcatcgagacgttttttcagttcttcattatgagtctgctgtttctcttccagctctttttcaatttgctgaatccgctctgcggcttggttcagcctttctttcgcctcagatatgtccgtgccgccgtccccttcagaatcgtttggatcgtccgccggctcatcagcaggcggagtgacgtttttagcggctgtcgcggtctggacagtttttggctcctgatcacctgtgttatcggaagcaggctgctcttcttttgtgccgtcttccgtttttccgtcttctccgtgattcgttccgttattcggatcggtatcgccggagttttcaccgtcatcgccttggcccggtttttcaggggccggattttctttttccggttcttttaatccgtcagaaatgtgattgatttcagcggagatgcgttttaactcgtcacgctgatcgtcaaggtcaattttcagatcgccgggtttttcttcttccggtttttcttcttctttcggttcatccgagccgtcatcacccgggtccttttccggaacggttaatgccggccgatcccttttcataagggtttggatactgttcagtgtttcaaatcttgcttgagctttatattgcgtcaaataattgtccagtaaattggattgaatattcgccatcccgtgttcctgatcaggaacctgcgcttctctcacctgttgggcggcaaaaagagccgatcccgtctggtcaagctgtgtctgcgcccggtttatgcctgaagacagcccgctcatcatcgtgctgaactggttggcggcctgctgtgctttaatggcattcagtccggttgtgatttgcttttgattttgttcctgcgcggccatcagcagttttttctgattttcttgatattgtttatagcgctcgaccgtatcggcaaagtctttgagcgtggttttggcttcatctgccgaggtcaatttttcttttgcatcgccctgcgcttcattcattgattttttcagttcgtcaatcaggtctttttgccgcttgatttcacctgccaagtcattggagctcggcttgtaaaagttgtacatgacgttttgaaactctgattctttattgacgatcttgtcaaaatcgcctcggacattgttcactttttgtgagacgaaattccaatataatgccgacatttttttattcattgatttttgggcgtcttctagctcacgctgcaccttttctttgttgacggcgttcaggttgctttgaatattgaatgtcagcgtggctttttgcggacgctccttgtcatagcttaagatgtcttttgaaaaatcggatggaatgtaaacgacggcgtcatacttcttagccgccagaccgttttcagccgcgctcctgttgacaaccgtccatgaataatccggacggccgccgagagcggccgctacttctttaccgaaatggacggattccttttcctcattttcatctgtttgtaagcccatgtcttcattcacgactgcgatttggcgggtggcgttaattttttgttttcccgggtcatcgccgataaaccggaaaaacagcaccggcagcagcagaatgatgacgaccgcggctattaatttgatcaggctttttcgttgttcagtcatctgacggcctccctttccgctgaacataaaggtatttggattttttgctccttcccgttttcaaccaaatagccgaagcccggctgaatgtccggttcctgcctttggtaaggcagcggaatgacattttgttcggattttttcacaagcagcatcgcgtggcggatctgtttcatttccgtcgttaaggaatcatagccttttgagaattcgctgtgattgcccgccgggataaaactgaagcccacatgcgcgtaagatttcataaacaacgccagtttgtcctgaatggcggtgtcgatcgtctgctggaatcttgtaatgccgtcggccattaacacgaccggagagaaactgagtttgtgcacatcgccatttttgacggcctgcgcatactgagcttcgcgctccgtgaaaatagcttctgccgtttcgatccactgccggacgtcttcttttgtatccagatagctgacctttgtttcctgcgcatactgcgacagtccgcggtcaatcgagtcaaacagcccgacccgttccgtaccttcacgcagcaggtgattcagcatcattttcaggatgtttgtttttccacgctgtgtctggcctaagataaggcaatgcttatttttgcccagatcaaagtacacagggctgaccttttcctcatgaagcccgacaggaatgcggaacggttcttgatccgggccgagacggagtgaaaattcgccggccgtcagcctatccggaagcatcggaatcgggtctgggccggctgttccggcgtggcgctcagctaatgctttgacatccgctttcagcgcctggaacatctcgaggtcattttccgcttcagccggaagaaacatttgcgcgaaatacagttcttctttttggatcatcacgcggcccgggatcggttcgagactgaacggcggacgcccgtaaatggagtatccttctgactgatccattaaataatggacgactttcgtttttatgttgtttaacagcgactggcggacggcgtttaccctcgttgcggtcagcaggaagtaaatgcctaagctttgcccgtcgcgtgaaatctggataaattccgtttctaattcatgcatttcatcttttacgatgtcgaaattgtcaattgtgataaatataaacggcagctcttcttcactgagcgaattgtacattttgatatggctgacttctttttctctgaacagccgtttccgccgctcgatttcttccttgatgcggatcatgaatttttcgatctttctcatttgatccattaagaaatagtctgcggtgtgcggaagctttgccaatggcagaagcgtgccgtttccgaaatcaaagatgtacatatgaagctcttccggcgtgtatccttccgcgaagttcatcaggaaggtgatggcagccactgacttgccgtagccggatgagccgaaaatgccaatgttgccgtcatccatcatcgtataagcgagaggcgcctgtctttgctgatcaggctcatcaacgcaggcgatgaagaagcggtctttttcctgcgcagggtaaagcgtgcgcgggatacgttcggcaagcggcggaagccacgggctcggcagcttttcaatgcccatttcattttgaatccgctcgatttcttcgactacggcttctatttctgccggggcgtcttttttcgccgcatcatccgcgtccacctcagacagcggaattaagcctgtgtcggtaacgatggcaatgtcatcctcggtgccgtatacatcttccatgtaaggggcgccgctccaagcagactggaactgctcatacacttcgttatttccgacttgcaagtagccgcgtccggtgaccgtaatattcgccgcatcactgtttttcaggatttctttactgtcacttgcatcctgcactttcagcgcgaccttaaagcgtgagttgctccatatttggtcgtcaatgatgccgcccggcttttgcgtggcgagaattaaatgcacaccaaggctccgtccgatgcgggccgcgctgacaagctccctgataaagtcaggctcttcgcttttcagctcggcgaattcatctgaaatcaaaaacaggtgcggcatcggaatctccgtttctccctgtttatacagctttgtatagtcattgatgtgattgacgcgatattgatcaaacagacgctgccgttttttcagctcgctcttaatggatgcaagcgccctgatactgaagtttctgcttccttcaatattcgtgatggtcccgagaaggtgcggcatcttgcggaacggctgggccattcctccgcccttatagtcaatcagcaaaaacgccgcttcatgcgggtggaaatgaacggccaatgacaggatgtacgtttgcagaaattcacttttcccggagccggtcgttcccgccagcaatccgtgcggcccgtgcgctttttcatgcaggtttaaatagacgatgtcgtcttttcctttatagccgatcggaacagccagcgattttgcagactcacttgtctcccacttctgcctgatgccgatttcttttacttccttcgcatgaaacagctccagaaatgagaccgtttcaggaatggaattcgtcattccgacctgatggtgcaatgtccgaagcgtccgggaaaaccgctcgttgtttgtccgttcatgcctgtccagcttaaacgggatctgcaccgcttttttctgctgaatgagaatgtctccctcatcttcattaatgtagcggacgagggtgtgaatgttttccgccaggctttccttcgtttccgcggcgatgattgccgagatgccgagatgctcatgccggccttcgatgtattctaaaatgacgtgctctgcgatcagctgctgatttgtgatgacaaagacaaaatgcggctggaagatctttttttctttatcttcttccaaatcccgctcccgcagcagctcgtaaatggacgataacaattgatcgcgggtctgttcattgtaaataaatcctttcgcgtacatatgaggcagctgaaattgcggcagccacttcatccattcccattccttatattcgtcctcatgaaagataaagacaaatcgcaggtcatggtagctgttgaagaacgcgagctggccgatcagctgatgaatttcatttttgacgatctggggtttcccgacaagccccatcggcccttcttgtaaatcaacggtcacgggcgcatggcggatatctttatacacacgctgcatgtgctgcgactgctccatcaagtcatccacatcacggttcgcaaggtctccgccgctcattgaaatctcgtagcttgccgggaccgtgcccgttccgagccggagcatcagaaaatccctgctttccagcgatttctcccaaatgcggccgctgatttcagaagttaaatatttcattttttcaaacgggggaaaatgatgcgtcagcacttgcagctgtttttccgacagcgtctgaagctctttccgtttgctttccaaatactgcttgtacacacgctcccgcttctcctcccgttttttccgctggtttttttcacggaaatactgcacggtggaggtaatgagagtcatcataaacatcgccaaagagacaaggatgaatatgcccctcggctgtataatggcgacaacccccattacaatcagcatgaccacaggaggcagaatgacgagccacagcccccggttattctgttcgctttcctgcgagggaaagctgaatgaaacgcggtcttctggaagatcgtagaccatgcgcggcgttcttcgatattgcgggtatttctttttcatttcggtgcttggttttaccgttttggttaaaccggtttgaagcttttcgtgatgaacgatttctaaaaggtcgtcctccgtcagcctcacacgcagaaaattccacagcagctcatctcccgtccggagcctttcgggagcttctgcaagtattccgttcacataaacgtcctggccatcagggacgacagaccagcatcctcccgactttcgcagataaaaagcccctgtttgagcggaggacggctctttgtatatatccgcttcctctgtttctgatgagaaaacgatctcatccttcccgccgataaaataaacggaggattcttctttgtcaggggtgagcagaagccgcatcgtctcttcttcaatccggcagggcatttcatttcctattgtcaattcgccggcatagttatttcccaggaaaacttcataacgatctgtttcttttcgataaagggttgcggcgttttgccgtaacggaagtgtgccgaccgtgattgtatctttcatatccggaccgatcgtaatcggctgagacggcgggagttcagacagctgaatcttttgtacgtgctctcggtaaaagacccataacagactcatatggcgaacctcctgacagcctgatcgttacctgcggccatttgatgtgtgctgttattttttttcatcttttttctcatctttcttgtcgttctctttgttatcttttgctttgtcttgtttgctttcatcctgtccggcggaagcttcggcggtgtcaccgttttcctccgcttctttatgctgctcctccgcctcttttttcgccttcgcaagctcgctttccacggcgtccagttctttctgcttttcgtcgtctttcatactgtcatccgctaataattgctgtttatattttgtaagtccgagccagatgtacgggttgtactcaagattgcggccgattttgatggcttcttcattttcccctctgccgatatcaatccaataaaggaaatgcttcgggtctgattgcagcgtgaccagattcccgatgtttttccgctgttcttctctcagattttcaactgccacataagaggaagcaagctcatactgcacagattccgggaggctttccgcatcgtatttggcgagtgtgtcaatgactttgctgtactgctgatttaaaaaatagcggttgctttccgtaattgcctcttgctttggctgggcgaaaaacagaacgtataaggagtaaagaagtgtcggcacaaggaggacggcaagcgccagaccggcgtatctttggattttccatttctttttcggcagttttatgtatgtcttgtccctttcttcgagggaatcaattgcggcttgaatggtttcttccagttcttcaatcgtctccgcctctagcacgctttttacctcaggagagaagtgaagcgtctccttgtacttcaaatattcatcgaaggtgtacgccccgtcagctgcaagcgccgcacaggctttgagctcttttaacaccctttctctatcttcctcataaggcggaaggctttcctttacgccgtaatgaagaaagtaaggcgtcagcgctttatcaaacacgatattttcaggggcggcaatcagattgagacgtttcagcttatgctgtttcacggcttggacgagacggtaggcaaattgccacctgctttttttatcttttccttttatatagcggaaagcctgataagaagaaggaggtttgattgtgatggttacttcgtcttctgaaactgagacctctttttgaaaaaaaggatcagcatctttaatcacgtttgcttccagcccgtcaagaagcttgattttttcccgctggaaggtgaacgtgaagcctgattcggtttcttcccggacggcgtctaattctgtttctaaataagatctgttatgacctgtcattccaccatgtcctttcataaaatttcaaggcggtctccgttcgtaatgccgcagtcagatagcttttgttctccggaaaaaaccgcttctttattgaccactctgatccaatagccttcacgcggcggaacggatacatgctgagcctgccgggcaatatcaatgacttttttcacagaatggtaatctgacaatctgagatcgaagacgctgccgttataatgtgttaaatctattgtaatatcaatatacatattcatatcacccttacatagaaagagcgccgtcttcttgattgaatcaggcgctccgtttcttcattcatcttattatccgcgaatttggttagcgatatcttggtcagtagactcaagcgtatttgccgtttgatcgagctgatgattcacatcttgaagcaattcagacattttaataaatgaaggtttcagctgctcatattgatctgcaaatgcttcacttgaagcaccttcccacatgcctttcaaatcagaaatcatgcggttcaggcggtcaacctgattcatgacttcctgactttcaacgccatattgcttagccatcgctcttagctcttcgggtgtgacacgaattaatccagacatattccttataccctcctgtgtcatcagcctaaatatgggctaattcacttatttttttaacgtcattattataaaaacaaccattcggcacagtcaaacaaatctgttttaattttacaaaatgagtcttatgatatattggatttttcgtcacatttacacattttgtaaatgtagtagtatgattttcttattattttcgtttccaccgaatgatcttattgtcctagtctatttccctgcaaagatgcctttcagtctgaaaagcaagatggtaagatcaagatatgaagctatgaaaaagtagggatacagatgaccaatccaaaggatccatttaagtacagtttcgacaggcttgaagatgttgccgaccatatcagtgaagttcttcaatgccccattacaatagaagacgttaatcataaactgcttgcatacagcacgcacagcgattgtacagatccggcccggacgtcgacgattatcgggcggagggtgccggaaaaagtcatcaacaaactctggaaagacggaaccattccggcccttttaaaaacggaccagccgatcaaagtgaaagaaatcgacgaggtgggcctgagcaaccgcgtggcgatttccatctggaaaaacaatcaggttctcggatttatttgggcgcttgaaatcaaaaaaaagcttaatgatgaggatctgaagacacttcagctggcagccaaagcggtgcggaacaagcttttgcacctgcagatccgcaaaacgaaaatcgaagagcggggccaggagtttttttggaaaatgctgaccggccatatttatcaggaagccgaaatggccgaagggtttcataagctcgggatggcgctgccgtccgtgttcagcgtcatgatcatccgtttacatgatgagctgactgaaaagacggaacagcagctgcaatatttgcaggaaacgacacagcagattcatgtcatgctggcgactgtcgattcaaatgaattaatcttattagccgcgccgaaaaccgatcagccttttaaagatgtaaagcacttcgcccttcatattcaaaaacagctgaaggaacgatataaaattgaggatgcgtcgattgcggtcggcggtatttacgaatcgatttcttatgtttaccgctcctatcaggaagcgctttccgtattaaaagcgaaagagcggtttgtgagagaaaccaaacaccttttcagcttttcggaactcggcatttatcagtacctggatgtgttggatgaaaaacgcaagcacagcggctatatgaactattccctctcaaagcttgagcagtatgacagggagcaccaagccgatatggtaaaaacgctcgaacattttattgatgccgacagcaacgtcaacaccgccgctaaagcgcttaacatccatgtcaatacattgaattacaggctgaaaagaatcagccagatcgcagaaatcgacttaaaaaatgtgaatgaaaagtttacgatttaccttgatatcaaacttcgcagcatgggttcgtgaaatttcacaaatccgtgtttttttattttctgtttcaaacaaagaattttcgcaaaaatcgcgctacacttgaaacatcacacaaacattgggggaaacagacatgattatcggggttccaaaggaaatcaaaaacaatgaaaatcgagtggctttaacacctggaggcgtttcacagcttatcggaaacggccatcgggttcttgtggaatccggagcgggactcggaagcggctttacaaatgaagattacgtatcagcaggggcggaaattctggaggacagaaagcaagtatgggatgcggaaatggtcatgaaggtaaaagaaccgctggctgaagagtatgcgtatttccgtcaaggtctggtcttattcacttaccttcatttagctgcagagccggaattagctaaagcgcttacagaaaaaggcgtgacagctatcgcgtacgaaacggtaacggacggacgttcccttccgctgcttacgccaatgtccgaagtggccggcagaatggccgcgcaaatcggggctcagtttcttgaaaaaccaaagggcggaaaaggaattttattagccggcgtaccgggtgtatcccgcggaaaagtcacgatcatcggagggggcggcgtcggaacaaatgccgcgaaaatggctgtcggactcggtgccgatgtgacaatgatcgatttgaacgcagaccgactgcgtcagcttgatgatattttcgggcatcagattaaaacattgatgtcaaaccctgtaaatattgcagattccgtcgcggaagcggatcttctgatctgcgccgtgctcatcccgggagccaaagcgccgactctcgttacggaagagatggttaaacaaatgaaaccgggttccgtcattgttgatgttgccatcgatcagggcggcattgtggaaaccgttgatcatattacaacccacgataatccgacttacgaaaaacacggtgtcgttcactacgctgtcgccaatatgccgggcgccgtaccgcgtacgtctacgctcgcattaacgaatgtaaccgttccttacgcgcttcaaatcgccaataaaggcgcggcacaagccattgcagacagccctgcgcttaaagcgggcttaaatacggctaacggacatgtcacgtatgaagcggtagccaaagacttaggctatgactacgtgcctgctgaaaaagcaatgcaaggttcggctgcaaaagcttaatagatatgaagaggacagcctgatcagcgggctgtccttttttctttctcataaaaggaaaaacggccccctgtctcgaatatcaattcatatcccggaagaaaaaggaggattcatatggctgttcagcactatggtgtattaaaaggcactgtgtcagatatgaaaagggaaacagatgatgattctccgcattttcaagtcgaggtgctaggcgagcctgatacgcgctatcgctgtgcgatcaatgtcatgtcaagttcaaaagaatcagaggttctgtatgcggcacgcgatcattttgacgcaagcgcgatcaccctgctgcccaacattccgtatggatataccccaattgatgaaaccagccgtgagctggcgctggattatgtccgcggcggattgtttgatccccggaacatggtgcccctcccgcatgaagtcaccggtccggataatgacttaaatgactttattgagacgtacatgcaaaaagccaaatcagaaaaagccaccgtctatatttacggctctaaattcgggccggagccgggcgctgataagattttcgggttcaagccgacaaacggcatgcataatattcatatgaatcagggaaacccaattgatacacgctggaagaaggataacggaacgtggcacgacggcggtattttaatccagtttgcagaccagtgggccgcggtctttttggcttttctgtctcagtcatggtgcacgaatgaagaaggccacccttatacattttgtgatcatacacagtttaacggctgatgtccgcataaaaagcctgccgaaataacggcaggcttttcttattacattttagcggcttcggcctgtttcaggctttccggcctcatatcacgccagtttgtttcaatatattcgagacaaacggggcgggtttcattcgtgaggcgggtttcccagccgtccggcacatccatataggccggccacagtgagtactggccttcagcattgacgagcacatggtatgagccgtcttcccgttcaaatggatttgtcatatcttctctttcctttctttaccggactgtacgccgtccgtttaatttctctgccagaatcgcgccaatgtcggcaagcgggcccggctggcacatatctttatggcggcagtctaagtcataccgctcgattttccccgtaatatacggtttccaagtatccggctcaatcgggtcaaaccactccggaataatcgttgatctgaagaacagcacatctccgtggaacggtttcggcttgtatgttcctaacagcccgacagaattaatgtacgtgtctttcagattcatcatcactgactcgtccaggctggctaatgcgcttccctcacggcggagaatggtcagcgcggtgtcaaaatcaagcggctgatccccgaggctgtccgggtcgtaccctcccagggcgagcagcgcgatgacggcttcctcgtcatcaggcgcattttttatcggcagaaaatgattcggatacgcgtcaagcatcaccaaaagcgaaacctcttcaccccggctctgtaattgtgtcgccatggcctgaatgacattccctccgagagaccagccgagcagacggtacggccctttcggctgcacggtgcggattttttcaatataatccgccgccatgtcatctaggctttgcggaagcgattctttttttccgatgcctctcgcctgtaagccgtatatcggataatcagcctctaaagaagacatcagcccggcataacaccagctgagaccgccggccggatggacacagaacaacggtgtttcttctcctgccgttctgagcggaagaagaacatcaagcgcgcttgcgcccgttcctgactcaagtctttcagcaaggcttgccaccgtaggagcttcaaataatgttccgatactcagctcggctcccatcgcttcccgaatacggctcattaaatgaaccgcaagcaaagaatggccgcctaaatcaaagaatctgtcatcaataccgacacgcggcaggtgaagcacctctgcgaacagctcacacagcatttcttcctgcggcgttctcggcccccggccggtgacctccgtttggaagtcaggcgcagggagcgcttttcggtcaagctttccattcggtgtcagcggcaattcatccatttggacaaaagctgacggaaccatgtaatccggcaggctttcttcggcaaaccggcgcatgtcccccgtgtccaaggtgctgccggcagatcggacaaggtaggcggccagccgtttatctcccggccggtcttcacggacgactacggcggcatcctcaacatccggatgtttgacgagaaccgcttcgatttctcccaattcaatccggaagccgcggattttaatctggtggtccgccctgcccatataatcaagagaaccgtccgtccgcagacgggctaaatcccccgtccggtacatcctcgttcccggcgggccgtacggatcagccacaaagcgttcggcggtcaggctttgccgccctaagtagccgcgtgccacgcctcctccggccacatacatttcgcccgtgatgcccgggggcacaggctccagccggtcatcaagcacatatacgttcagatcaggaatgccgcagccgatgaggctgtttgctctcagctcggcaatgtttttgtctaattcaaggtaactgacgtgcaccgtcgtttccgtaatgccgtacatattcacgagcaccggctgattgtccgcgtggcggctgtaccaatcctcaagccggctcagctcaagcgcctcgccgccgaagatgatatatctgagtgcgagctgacgccccagctctttgtgttctttttccgcatgcatcagctggtaaaacgctgacggcgtttggttaagcacggtcacccgctctttcacgaggagatgtaaaaacgcttccggcgatctgctgatgtcatgcggcacgacgacgagacgtccgccgtgaagcaacggcccccacatttcccagacagagaaatcgaaagcgtaggagtgaaacatcgtccatacatcatcagaatgaaagtgataccaatgccgcgtcgactcaaacagccggataacattgctgtgcggaatgatgacacctttcggcacacctgttgatcccgacgtgtaaatgacgtaggccgggtgaagcggtgacagcggccgaatccggtcagcgtccgcagggttcgtgacggcatattgccgaagtgtttccttgttctgcgggtcatccaatatgaaggccggcatgccgctttcgatagagagcttacttgcgccttcacggttggtgagcataaatacaggcttggcatcatgtaacataaaagcaatgcggtccgcgggataatcaggatcaagcggcagatacgctgcccccgtcttcaggacggctaacagcccgacaatcatatctaaagaacgcggcagcgccagtgcgacaaactgctccgggccgacgccgcgggcaatcatcatgtgcgcgagctgattggctctttcattcagctctttataagtgagtccgctctcttcaaaaactgccgccgtttcaaccgattttgcggcggcctgtatttcaaacagttcaggcagtgtctgccgaggctgaatatgctgttttgcacgtttaaccggcaaaagcttccggcgctcttcatcagaaagaatggttaagcttccgatcggtttttccggatgtgaggcggcatcttcgagcagaagaagcaggcgtccggcaagtgcttcagccgtttcttttctaaataagtccgtactgaactccagcaggccttcaataccggcaggcgtgccgtcgtcatggcgctgttcagccaattccagcgtcaaatcaaatttggacgatccgacactgctgatttgcaggcttgtttccatctcaggaagactgagtacagggtcaggcgtattttggaatgcgagcatcacttggaacagcggatgtcttgaccgggaacgaaccggattcaattcttccacgagacgttcaaacggcacgtcctgatgttcatatgctgcgagattcatttccctgaccctttcaagaagctcacaaaagctcggatcgccagaggtatcggttctcagtacgagtgtattaatgaacatacccacaaggtctcctaatgcgtcatcactgcggccggctatcggactgccgatcggaatatcggtccctgcaccgagccgggtcagtaacgcggaaagccctgattgaagcaccataaacaggcttacgcgctgatttctggcaagtgagagaagacgggcatgaagctcttggccgatgttgaccggaatgacgccgcccctgtagcttgattcagcgggacgcggaaaatcagacggcagctccagctgatccggtacattttcaagcgttttcttccagaaatccagctggcgcgcaattaagctctcagaatcagacgcgctgcctaaaagctgctgctgccaaagcgcataatccgcatattgaaccgccagcggcgcccattctgctttttcacctgtttgccgggcgatataggctatggataagtcacgcatgagcggattcaaggaccagccgtcacctgcaatgtgatgcaggagaatcatcagcgtatactcgccgtcaccaagatcaaacagctcggctcggacggccggctctttagcgagatcaaaccgatatcgtgccgcagcggcaagcatgtcttggagctcgtttttgtctgcacgtgtcactgtaaacacagggcgggcttcttcagcagataaaatgagctgatgagatgatcccttattttccggaaaaacggtgcgcaggctttcatgacggctgacaacatcgtaaaaggcgtgtttcagcgctgattggtcaagcttgcctgacatgcggacaatcaccggaatgttgtaagtcgggcttggcccttcaagacagtagagaaaccatagacgcagctgcgcaaatgacagcgggatatgctccggccggtcaaacggcttgagcttaggccgcgcactctttgcggtgtcaagctgtgcggcgagcccggcaacggtcggcgtatcaaacagacggccgatgccaagctctgcgcccatcgtctcccggacccggctcatcaggcgtccggctaagagcgaatgtccgcccaattcaaagaacccgtcatcaattccgacccgcgcgagaccgagaacctcggcaaacagatcgcataatatttcttcctgcggcgtccgcggccctctgtcagacaggacagcggaaaaatcaggtgcaggcagagcgctgcgatcgagcttcttattcggtgtcagcggcaattcttccagctgtacaaacgcgcccggcaccatataatccggcaggctttcgcccatatattcacgaagtccgccgatatcaaggggctgatccgcgacagcgtaagccgccagccgcttatctccgggctggtcttcacggacaatgacggcggcctgcgaaatacccggatatttcgacagcactgactcaatttctcctaattctatccggaacccgcggattttaatttggtgatcggctctgctgatataatcaagcgagccgtcctcacgccagcgcacgagatctcccgtccgatacatcctcgcgcccgcgggcccgtacggatcggcaatgaatctttccgctgttaaatcaggacggttataataacctctggcaagcccctcccccgctatataaagctcgcccgcgattcccggcgggacgggctgcaatgcggcgtccagcacatatacccgcgtgttccaaatcggctttccgatcggaggcgcccctgtatggccttttgcaagcggctgtgcggccgaccagattgttgtttcagtcggcccgtacagattcgtcaccgtacagcctgattcaagcagagcatgcataagcgcattcggaagcgcctcacctccgacaagcacctgcagcgcccggagagaatccggttcattggtgactaatgaatgccacaatgtcggcgttgcctgcatgattgaaataccgtatgagtgaatcatgtgcgcaagcgcccgcggttcctgaatcgtctctttacgtgcgatgacgcaccccgccccgcttatgagcggaaggaagagctcaagcccggaaatatcaaacgccgcagtcgtaacggcaagcaggcggtcttgtgcgccaagcgggaacatttcccgcatggataagaggaaattgcttacgctttttaatgtcacgactacgcctttcggtttgcccgttgagcccgatgtataaatgatataagcggggtgcaaaggcgaacattccgcctgagcgggaaagtcagcattttgagcggcaacggtttttaccgtatccgggtcatcgagaatgatcctttttgcatcactgtcttccggcatgcggccggataattccatcgttgtaatcaggcatgcaggctgtgcatctttgagcatgtatgtgatccgctcagaaggaaaatcaggatcaagcggcaggtatgcggctcccgttttcaaaacggccagcatgctcacggccaactcctgtgaccgcggaagcagcaaagcggcaaattgttccggtccgagccccttttcctttagcatgccggcaagctggttcgcgcgcttgttcaattcggcatagctgagctcttcgttttcggtgatgattgccggccggtccggtgtttttacggcctgttcgtaaaacagctccggcagacttttctgcttctcggccttgcgcgtgtcattccagctttccagtacgcggagacgttcagtttcaagcagaaggttgagtgtgccgattttttgtgtctggtctttcacagcggattccaacagaagcaggaatcgtttttgatgattttcaatatcttcggcgctgtacacttccggattcgcatcaaagtccacacgcattccgcttccgtccgctctgtcgtaaacgttaattgacaaatcatcaacgggccctgctgataagttatgaacggtcccccgcgctccggcgaaatcaagcgcgtagtcaaacggcatcacattgacttgcgggccgaacagcctgcgattttctccgagcaatttaaggtcgcggcgcatgtcttcatggcggtatttctgatggcgccggatgtttcggatttcttttgccacttggctgacggcctcatgaaaattcatatccgggcggagagaaagccgtaaaggaagaagattcatgaccatactcggaatattcagtgaaattgagccgatccgccccatcatcggtaaaccgagcacgatatcccctgcgtttgtcatccgatggacatataccgccgctgcggccgtgacggcttcatgccagttcggaatcgcttttacatgctgtaaagccgtttcagaaagataagccgcgcttctccgaaaacgtgttgacgttcgcggcgctctttctgccaaactgacgacatcaggttcatccgcaaatttctccatccaaaattcccgatctttcaggaattgatcagacgcgcggtattcttgctcttcttttaccagatcctccaaagaaccgaaggagcgcccgttatccggacgtccttcccgtattgcggtgtacatttgcgccgtacgccgtgccagcagtgaaaaaccgtagccgtctatcgcaatgtggtgaatgcgctgataccagaaaaagcgttccggtcccgcctgaaataaaatgtcgcggaacaaaggcccggccgccatatcaacgggctcagccaaatctgtctgcatgagtctgagtgcggcctgcttcggatcagcttctgaactcacatctatgacatcgatcgcagcctcaaatggaggattgatgatctgctttggcccgtctgctccctcctcgaagcgggcgtgtaatgacgcggcttccgtcagcacgcgttcgagagcggttttaaatatgttcacatcgatcgcgccgtttatctcaacgtactcgcctgtattgtaaatcggattatcaggatcaagctgctgcgcaaaccagataccggcctgtgcgcctgtcagaggcagctgttgtgtatcatgcattctattctctccctttataaataatctgcgttcggcaagactttttgagatcgggaagaaagaagtctccaccactcttccagcgtcgggttctccgccagttccacaaacgtcacttcagctccgtcacggcgccattgttcgacaagactcatgattctgacggagtcaagacctctgtccagcaggtcttcatgatccggaatatcagacggtgattcttgaagaatcgccgcaatttgttcccgcacccggtcttttgtcaatacggcggaagccttcccttctccttcagaaaccggcgcgccgcccagcagctccagcacttcgtttgtcaaagctgtgtaagcgcagcgctgagacgcatattcgatggccatcttatgtttttctgaagaaaaatcagcaacggcgtctccgataaagaagctttggatatcatccataaatgcttcacaggctgtgacgagacagccgatgtgtgcataaattcccgtaatcatgagctggtctctgccgctttcacgcatgatgtcaaggagattcgtccgtttaaacgcgctgtatctccactttgtgaggacaatgtcctgatcatccggggcaagctccggaatgaccttttcttcataaggcccgctttttagccccggcccccaaaaatccgtcagcagcgcacggtccgccgggtcttggctgcccggctgcgcggtatacaccaccggaatgccgagtgctttgcattgctcttttatttttttgatattctgagacgcctctgtgatcggagcttcacctttcgcaaaagcatcgacgaaataattctgcatgtcatggatcagaagcaccgcgcgtttcggattcagcgtccacgatactttattttcaggcatatctgacgctgtcggcagcgcatatgcgggaatagacggtatagccaatgtaaacacttccttttttaagattgtttgatttcagccggctttactttttgggcgatcgtttcgcgaagatcctttttactgaccttgccgacgccggttttcggaaaagaagcgataaattcaatccggtcggggattttatatgccgccagtccgcgctcacgcaaaaatgctttcagctctcccggtttcggcgcttctcctttcgggatgacgaacacacaggaacgctccccgagaaaatcatccggcattgaaaccatggccgcatcatgaacggcaggatgcgcaagaaggtgattttccacctcctcagcggctattttttcaccgccccgattgatttgatctttcgcacgtccttcgacgatgatatagccgtccgccgtcagtttgacgatatcgccggtctgataaaatccgtcggctgtgaatgatctttcattatgttcaggcgctttataatatccgcgaatcgtgtaagggccgcgtgtaaacaaatgtcccgcttcaccgggggcgacatcccgcccgtcatcgtctaaaacccttacctcatcaaaaggtgacatcggtctgccttgcgtattgacaatgatctcttcaggatcatccagtctcgtataattcaccaatccttccgccattccgaaaacctgctgaagagtgcatccgaaagcgctcttcacacggcgggccgcctcagcgctgaatttggcgcctcccacctgcagcacttgaaggcttgataaatcatcacttcgcgaaccggatgcgtccatccacaccatcgcaagcggcgggacgagcgctgtaatcgttacacgttctttttcaattaacgggaagcagtcatccgggctcggcgtcggtgacagaacaacccggcctccggcatataaagttcccagcacacctggcgagctgagcggataattatgcgctgtcggcagagcggccaaataaacgctgtgttgatccaagccgcatatttccgcgctgatgcgcaaactgtatatgtaatcgtcgtgtgttcgcggaatcagcttggacagccccgtactgcctcctgaaagctgtaaaaaggcgacttccgccgggcttacctcttccagctgaacaggctctctatgcaggctgctcagttcctgaaactcttcagcttcgccggccacaatgacatgcgccaaatcaggaagtttgtctttcacctgtctggcaagcgccctgtaatcaaaacctgaatgcatatcaggaatgatgtatgctttcgcctctgcaaactcgcagaaatacgtaatctcactgcttctatgagaaggcagcgcgaaaacgggcagcgctcccagccggaacagcgcgaaaatcacttcaaaaaactcagcgatattcggcagctgaacgacaacgcggtcttccttttgaattccgagcttatgcagccccgccgctaaacgatctgccctttcatctaattctttgtaggtccaatgtacatctttacacgtcacggcagtttgatttccgtataaagccgcgcgctctttcagcattcctccgaacgtctcacccttccagcagccgtcttttcggtatttgtcagcccattcttccggccatggcgtaaatccagtcagcacgatccgttccctccttttttacaactcatcttggtaaagccccatcgcccggagcatggtgcggaatttcgccgaggtctcgtccaattcatcctgcggctttgatccggcgacaatcccggcacccgcaaagagccggagagaccttgtttccgcttcggcgcagcggagtgcgataatccattctccgtcaccctcagcatcacaccagcccgccattcccgtgtagaaattgcggtcaaacggctcaatatcctgaatcgcttctctcgccgcatccgtcggcgttccgcataccgcgggtgtcggatgcagggcgatggccagctcaagtgatgtcgttgacggatcacgcagctctccctttacctcggtggacaggtgccacatcgcctcagttttaatgagtgacggtttttccggcacatcaagcacacggcagaacggtttaagggcggcggccacggcggccacgactacggcatgttcatgcagatcttttgctgattgcagcagttcttccgctcttctctgatcctcggcgggatctgtgctgcgaggtctggaacctgccagcggattggacagaatcgatgttccgtttttggacagcagcagttcaggacttgcgccgaaaagcgtttttcttgtttctgacgttcccgtcacatccgcagcgaatgtatagccgcgcgggttgtgctgcgccaaatgcttgacggcctgtggaatgtcgatattcttttcagcggtcagatgaagcgtccttgacagcacgattttgctgagcggaccgtccgtaatgttgaatacgccttgttccacaccgctcataaagccctcaggctccggaacgggacggatgtcatatgtattggattgcggcttttctgcggaagattccgcaaacgaaagcgggcctgccgtatggacattcttcggtacaaaaagccgggaagcttttctgccgtcaaaaggaatggcgccggccgcaatcggatgtttgatgccggcttgctttgcctcaagaagcgtctgtctcacgcgttcaggcagtgaatccagctgattttccgcgtctgtatcaggcacttccgcaaacattccttccgcaagcatcgtacttttcggggaagctaaaaagaacgccccgggcttgtaagcgtccagcacctcttttgcagacacttccgccaataaatgttgatttgtcatgtttgtccctccttctcgttacatcaaacgcctaaagtagcgccgccatcaacgcataaatcatgcatcgtaatatggtttgcctgttcagaagccagaaacaaaacggcatttgcaatatcagaaggcttcgccagcttttgaagcggaattcccgttttatatgtatcaagcgaacctctgatgacgtcccgggctccgttctcgtcctgccacagcgcccgctgcatgtcggtttccgttgaacccggagatacgatgttgcagcggatatgatgggccgcaagctccagtccgaggcatttcgtaaacatgacggcagccgcttttgacgccgcataagccgccatggaagcacgcggaacgccggctgcattcgaaccgaccgtaacgatggcgccctttttccgctcaatcatgtaccggcttacagcccgcgacacatgaaatacgccggtcgtattaacagaaaatgtttgatcccaatcttcatcactgagggattgcaccggacccggccgcagcacgcccgcaacgttcgccaatatttcaataggccccatgtcgcgttcaacggcggcgatgatatcattgacagccgcactgtcagatacatctgcggcaaacccctgcgcctgcacgcctttttgccgaagtctgtcagtaagcccgagaagcaggtcttcatttgtatctatagctgccacatttacgccttgttcagcaagggcaagcgctgttgcttctccgatgccttgagcggcgccggtgacaacggccgttttccctttcattcccaatgcgtccatattatcattccccttctatattgataatgattatcattatcaactatgattcaagacaatcatatccaaatcaaaacacgcagtcaattagaaaattagaatcagccgcatttagttcgaagggcctgttttttctcatgcgggagaatacggggtatgcggtcctcccggattcaggcagaaacgcagggccctgctgattaaaacgggcaggacagaaatatggccctctccttcaaactcgctgtattcagcacggactccatcatcttcaaatccggataataaagagtacagcgcctctgcgtgctgcgggattctgcttttatgtgttttttcaatttctcccgcagccagcaatacgctgacttgaagattttccgcagagagccggtctgacaaacgctccgctttttcctgaataaaacgcttgttccagtgaattgacggactcccggcaacataggtctggaacatgtccggcctcgtcaaaagcacttgcagcacaaaaagaccgcccagcgaatggccgaaaatcgtctgcctgcctctgtcgatcggataatcccgctccatcgcgggctttacttcttcttctataaaactcagaaacgcttccgcccctccctgttcgggccatgccgcgccgcgcgggtgcaccggcagttctgattcagaaagcggcatcgtaaaatcactgtgacgttcggcggaaaacggctgatctgtcgggtagccgattccgacaatcaccgccggaacaacgcctgttttttcaggccgtcggctttgcacccgcaaagcttcggccattgtgccgaatacagaattcgcatcgagcaggtatatgacggggaagccggatgcaggcggttcttcctgaggaaaagagacaaagatacgatacgtacggcctccttttgagcgcatttctcttacttctgtgcccggaaccgcgtatcggccggccggcgcgaaaccccgctttatttgttttccgtccattatgtgttcatcccctttgcggcaattgctttatctattcttattgataatgattttcaatatcaaaagacacctcaaataataggttttttgccaaacaaagtcaatggatttttgatataaaaaaagcaccttatttcaataaggtacctaagaactatatagtgataggggcttaatcccatgtaaagcgctcattcttccatggatctcccctcatatggtagccgtttttctcccaaaagccggggtggttttcctttgtgaactgaatgccgcgcagccatttagcgcttttccaaaaataaagatgggggaaaacgcctctgagcggatagccgtgctctggcgttaacggctcgccgttatgcgcatatgccagcagggatgtttcccgcgtaaaatcagaaagcggcaggttggccgtccagccctcttcagcgtgcagaatgacgaaccccgcttctttgtgcactcgcgctttttcagcgatgtctttggcgcgtattcccttccagatattatcaagacgggaccagcccgtgacgcaatgaatatcatttttcacttcggcttcaggaaaggctttgatatcctcaaagcttagcagcataggacggtcaacaagtccgtacacttgcagattccattttgacatatcttcataataaggaacatttccggcgtgaagcacgggaaacttcgttgtgacattttggtttggcggaatccgttccgactgttttgtttgtttcgttttcccgaaaaacatatggctccctccatttagtaaacctgcattaaatctttgttgacaatcaatcacccttcgattacgctaatctggtacaagtgtaagggggaaaaacaaatgaaacaacgcaaccttcgcgcgggcgatatggcgcttatcggcatgtttaccgcactgatggccgtcggcgccaacattacatcaatggctccttttttgcaagttgcgggaattccgttatcgctgcagcctttcttttgtctgttagccgcgatgcttctcggcgccagacgggcagccattgcaatgacggtatacgcattggccggactcgcgggggcgcctgttttcgctcaattctcagcaggctttgcgccgtttatcggaaagagcggcggatttattctcgcttatatcccggcggcatttgcagccggatggctgctggaaaaaacaaaaaaacccggccgcctgcattatgcatgggcctctttgatcggtaccgccgtcatttatatcattggcacgacctatacgtatattgcgctgaaattatggcttcatgctccgatcagctacggaatggcctggttttacatgatatggtttttcataaaagatatcgttttagcactgttattggcatcaatcgcgcctgccgtttacaggtctgttcataaagcgacggggttcagcagaaacccggcgtaagatgttctcagcatacaaaaaggctcccctttccgggagcctttttttacaggacaagtgcggcaatccagccgaatatcacaagtggaatgttatagaaaataaatgtcggtacgcacgtatcccaaatgtggtggtgctgtccgtcggcgctgaggcctgacgtcggcccgagcgtactgtcacttgcaggagaacccgcatcaccgaccgcggcggccgctccgattacggcaatcgtcgccatcggactgaatccgagctgagcgcacagcgggacaaatatggtcgtaatgacgggtacggttgcaaatgatgatccgattcccatcgtgattaataaaccgaccaccagcatcaggagcgcgcctaatgattggctgtggccgataaagcctgttgatgctttgaccaaggaagccacatcacccgttttattcaatacatttgaaaaaccggccgcaacaagcatgacaaacccgataaaagccatcagaatcatgccgtccgtgatcagcttatccgcttcattgcgcttcatgactccgctgataaacagcgtaaacaagccggcaagcgcgcccatgatcataccttccactccgagcacttgtgacagatagagctgaacggcaagcgacacggcaatggagatcaaggcgatggcaatgctttttttcgtataaggagaagacgatagtccggcaatctccttcgtctcatatttcttcggtttccggaagacgatgacggctaaaattaaaccgactaccatcccggccgtcggaatgattaaagcataagggatatcactgagcggcacctttaaaccggctgccgccatattatctctcagcatcccctggaaaatctgtccgaatccgacaggcagaacgatataaggcgcagtcagtccgaatgtcatcacacacgcgatcagtctgcggtctatttcaagttcgttaaatatttttaaaagcggcggaatcaatacaggaataaacgcaatgtgaacgggcaccacgttttgcgagaaacaggatatgattaaaataatcagtacgattaacacttttgacagtgcttttttccgcgaatcttccttttttccgattagtttgacagacgcttccaccattgcatcgggaagccccgtctttgtcagcgccgcggcaaatgctccgagcagcgcgtagctgaccgcgacggtggcatttccgccgagaccgtccgtaaaagccttcaccgtctctcctaggcctaagccgccggtcagcccgccggcaagcgcgccgatcattaaagctataataatattgacacgcagcaggcttaagacgagcataagcaatactgcgacaacaacagcattcattgatgagtccctccaaaaatcctttagtttgctaatgtagtagataattaaagttaccatatattctgcgctttagtcaactaaagattttggaaatcaaaaaacccgctgcatcaaggcagcgggatgctgttatctttcgggcgtaaagcgctcagtcaaaacagccaacgtccttgccatgacgcctgttgcgccggcagggccgaagcatgtcgctttattcgccgttgcggttcccgcaatatcgagatgaacccacggcgtgttttccgcgaattcaccaatgaatgcccccgccataatcgcgtggccttctcttcccggagaattgttcaaatcagccatctgactgtttctcacccgttttttatccttttctgtaatcggaagctgccagatcggctcgccggattctttcgccgattccgcaacctgttcataaaacgcggcgtgattggtcatggcgcccgtcatttcgttccctaaggcgacaatgacaccgcccgttaacgttgcgacgtctacaaggacagaggctccgtgctgcttggcgtatgtgatgccgtcggcaagcacgagacgcccttccgcatcggtgttcaggatctcaatggtttttccgctgagcgaaacgatgacatcatccggcttcatagcatcagacgaaatcatgttgtccgtagacggtatgacggcgagcacgttttgttcaggccgcagttcgccgataatttccattgcccctaataccgaggcggcccctcccatatcgcttttcatgccgacgatgccggttttcggcttaattgaatatccgcccgtatcaaaggtaattcctttaccgaccaggccgataacgtcttcccactgatctttgccctgatacttcagaacgatcattttcggcggttcggatgagcccttgttaacagcaagcagcccgcccatgccgagctcttccatttcatctttttctaaaatttcacactcgaaatcgtattttgccgcaagctcggcggcatatgacgccaaatcagtggccgtcagcatattacccggcatattcacaagcgtgcgggctgaattcgtcccttggccgtatgccgctccgacgttcaggccggcctgcacttccctcaggtcttcttcggtcacggcgcagactgatttcagttcctgatccggctcatttgatttatgtttataatcctgcacttcgtaaaccgcaagcagacagctttctgaaagcgcatgagcggcatcggcggcaggcacttccccggagacgaatgtatcgagcaaaacggatacttcctgttttttatcttgatgaatctgctgaaatactcgtgcaaagcattctttcgtatcttcaaacgaataatccgcttctcttcccaggccgataaaataaatacgtttcataccggtcgcagccggagggtatacttttgatacacgattgcgtttggcggacacatcaccatcctttaacagctgggtcagatgaccgtccaatttatcatccaattccttcgtaaatccgttcagcgtgcttttttgaaaaagaccgatgaccagtgtttcgggatgccgcagttgatcagatgcataaaacatgagtacacactccttatgtgggtatttgttatgtaaagtggtataatgaaaaaacatttttcattgattttattttaccaaactaagggcgttttctgcagtttttcgatacgatcggaatcagcagatacagaaaggatgttgcatatggatgtacttatgaattttcctttactggcgagttttgccgccattatttttgcccaagttgtaaaagtgcctattcaatttatcgtatcaaaaaaacttgactggtctcttgtgacgagcaccggcggcatgccgagctcccattccgctgccgtcaccgcgctgtcaaccggagtcgctttggaacagggactggattcgcccctgtttgcagtcgccgcgattttcgccgtcattacgatgttcgacgctacaggtgtcaggcggcatgcgggtgaacaggcgacggtcattaatagactggtcatcgactttaatcggtttgtcagcgaagcgaaggactttcagaaagcggaagagaaggaaaaacagaagaaactgaaagaactgctcggccatcagccgattgaagtcttcttcggcggcgtcaccggtattgtgctgacattgattttagattatttctttatgtaaaaaacgcttcagcggatgctgaagcgtttttattcttttaccgttttgtattgatttctgaacacttgcatcgacttggtttcgttcagctttacaagttcgtcctcggtcactgtgccgttcccttttttaatcatgtagacctcaagtgtttttttgccccaattgttatagacgtccttgacggtgtcaaagtagaggtcaaggcggctgcctttaatttttgagccggtatcggcgacaaccccgtaaccgtaattcggtataaacagaatcgtcccgatcgggaaaacagacggatcggccgcaacagttgaatataaatcgcgtttgaccttcacgcctgaatatgtaattccgtactgcggatgacccggagattttccggtagattccgctccggcggtataaccggtggccgtcaccttttgtgacggatagcgttcccagtcaaaagcttcttccagcggtttcatcctgcctgatgccttcttttccggctgattctgtaaggattgaaacggagtgccgatgtttttcaaaacggcgccgcgatgttccgtcatccaatttgtcagatcctttgcttcaacaccggttatggaaaagtatgtcgcatggcatgcgcccaaaaagagcacgatcatgaatacgcgtctgattatcgtcaatctgaaatcactctcctccgagtcattgttcccaactcggtgaggtgctatacaaaaagcgccgcggcacaaaaaaagctttctcaaataagaaagcggcttaaaacatttgatatcctctttttctgagcgcctttatggcaatgcctgacgtgatggctcccgccagtccgcccgccaaaatcacgacatccgcaaccgctaatgacatgatacgctgaaacaggctttgaaaggattcccccggcgcctgcacgtaactgatcatctttttattgctgataatgaaaaggcatacaatcggatagacaacagccataatccacgacattctaagcagcatgttcaacagaaagcctatgccgaaaaacagtacaaaaaatagtacgattgagatcaggacaaccggcaaactaatcacaaacatccaccccctacagcactttcagtgtacctcgggggcggtaaaaaagtcaacgtctggaaaaatcatcgtctctctttgccgcttccctggcaggagggacatgtttcggagccgccaagaagcaattgaaaataccctttacctgagcagaacggacacgccgccgtgctttttgctgtcgttttcatgcggatcaccctttttcttaattttctgataatatatcatatttacttgtcaagcaccaagtcagaatatgtaacaaaataactcatgtaagcgaaaacatttatttttttcttttacattcttttgatagcgctcttttttaaaagaagagaaaacccgcggctgcgggttttcagaagaatttaaacttcccttttttcagcgtcaggcccagcccgccgatcataaagagcgagcggttgtcaatgacctttttcataaaggacgccggcgtgcctttgagcttcctgccgtatacgactccgacagcgttatgctcaccgagggaggcaacggttcctttaatgtcaggcttgaactcttcaagctggcctcctttaatcaaaccgcccagatttttggcgaccgtttctccttgctgcatcgcgatctgagcagtcggcgggtacggccgttccgtctcttcattgataaagagcgagctgtcgccgagtataaaaacgtcatcatgtcccggcgcccgaagatcagggttgaccttgacacggccgcgcatattttcaaaacccgcttcctccacgatcggatgcccgcgcacgcccgccgcccagacaacggtctgcgatttgatttcttccggctcttcatctttcttgccgactgtgacaccgtctgcgcggcattcttgaaccgcggtgccgattttaaattcaacgcctttgctctcaaggtattgaacggcgtaatcgacaagctccggatcaaatcccggcaaaaccgtcggggcggcctcgacacagacgatccggacgagactttcatctatatcataatatctgcataactccggcttgcggttcgcaagctcaccgagaaattcaattcccgtaaagcccgctccgccgacaacgatggttaagcggtcagggcgtttttcggcctccgtattgtatgtcgcaaattggagctcaatatggtctttcagctggcgcgacgtattaatattcgcgatcggaaaagcgaattcttttaagcctttaatcccgaatgtttcagggacggcgccaagcccgatgacaagataatcataagggatgtccccttgtgaaagcgtcacctttttattttgcacatctatcgcttttacggtatcctgcacaaatttgacccgtgattcattgattacatcttttatttgatatctgcagcggtcatgatgcagcgttcctgcgctcgcttcatgcatccatgtcgtttcataatgataattgtgtttattgaccaaagtaatgtcagcgtcatttgccccgatatgcttcggaagccttgttactgtcattaatccaccataacctgcacctaaaaccacgattttgggtttattcaatgccatcacatccaccttcttttttttgctgttagacgcataatcaaatcaacatttgtattagcttcagcctattggcgggattttatgaaatgaaatataaaattttttagaaaaccgcacatgtctgcatatcaccatactatccggaagaatcagaaaacattcaggaaaaaacagattggaatttgtccccatattagcggcggccgcaatttttttcaagaatgaagcggcctggcggttttcggcactcgtcatccttttaaattgtatgttataattaataacaattttcaattaggaggcaatttggtatgcaagaggattcaaaggtttatgatattacggtcatcggcggcggcccggtcggcctgtttaccgctttttacgggggaatgagacaggcgagcgtcaaaatcatcgagagcctgcctcagcttggcggccagctcagcgcgctgtatcctgaaaaatatatttatgatgtagccggatttccgaaaatccgcgcccaagaacttgtgaacaacttaaaagagcaaatggcaaagttcgatcagaccatctgcttagagcaggccgttgaatctgttgaaaaacaggcggacggtgtgtttaagcttgtcacgaattcagaaacgcattattcaaaaacggttattatcaccgcgggaaacggcgcatttaagccgagaaagcttgaactggaatcagcggaacaatatgagggcaaaaacctgcattacttcattgacgacctcaatcaattcgcaggcagacgcgttgccgttctgggcggcggcgattccgcggttgactgggcgctcatgcttgagccgatcgcgaaagaagtcagcatcatccaccgccgtgataaattccgcgcgcatgagcacagtgtcgaaaacctgcataattctaaagtcaacgtgctgacaccgtttgttcccgctgaacttgtcggtgaagatcggatcgaacagctcgttctcgaagaagtgaaaggcgaccgtaaagaaatcatcgaaattgatgacctgatcgtaaactacggctttgtttcttctctcggcccgattaaaaactggggacttgacatcgagaaaaattccatcgtcgtcaaaagcacgatggaaacgaatattgaaggcttctttgccgccggagatatctgcacatatgaaggcaaagtcaagctgatcgccagcggtttcggcgaagctccgacagccgtgaacaacgcgaaggcttacatggacccgaaagcgcgcgtccagcctctgcattctacaagcatgtttgaaaaataatataaaaaagagtctgtgtcataccggcacagactcttttttatttaaacatccaaatataattcatgacggttccgacaacgagcgcaatgacaagcgccgacacgacccaaatcgtgcctaaaataatccggtcctgaattttctgggcattcgggctgtgcccgggctgtttttgttccacaccggcccctcccttctttgcaaatctatctatcgtaacaaatgtcttaccacacccaatactactatgataaccaaactgcaaatggatgacaagctgaccgcatatgaggcagcatgaaatcatttgacattcctgacaaaacaaagtacattataaaaagacgaacattttaattttatttaattctattattcgcttttaggggtgttatatatggaaaatgtatttgattacgaagatattcagctgattcctgcaaaatgcattgtggacagccgatctgaatgtgatacatcagttacattgggcggacacacgtttaaacttccggtcgtgccggccaacatgcagacgattatagatgaaaacatcgcggcctggctcgcggaaaacgggtatttttatatcatgcaccgcttcgagccggaaaaacgcctggcttttgtccgggatatgaaagtgcgcggactgatttcttccatcagtgtcggcgtgaaggaaaatgattatgaattcatccgggagctgaaagcacaggagcttgtgccggattatattaccattgatatcgcgcacggccattccaatgccgtgatcagcatgattcaatttattaaagaacatgtcccggaaagctttgtcatcgcagggaatgtcgggacgcctgaagccgtaagggagctggaacgcgcgggcgctgacgcgacaaaagtgggaatcggccccgggaaagtctgcatcaccaaaattaaaaccggcttcggaaccggcggatggcaattagccgcgcttcgctggtgcgcgaaagcggcgagcaaaccgatcattgctgacggcggcatccgcacgcacggcgatattgcgaaatccatccgattcggcgcatccatggtcatgatcggatcattattcgccggccacgaagaatcaccgggacaaacgatcgaaatcgatggaaagctgtacaaagaatatttcggctccgcttctgaatttcaaaaaggcgaaaagaaaaacgtcgaaggcaaaaaaatgcatgtcgaacataaagggtctttacaggacacgctggttgaaatggagcaggatctgcaatcttccatctcttacgccggcggcaatacactcgaagccatccgcaatgtcgactacgtgatcgtaaaaaactctattttcaacggcgacagattttaacacacagcagagccgcaaaaaataaaaaaatgacattcaatatgaatgtcatttttttcattaaataccgaaataaagagccgcactggccaacagattaatcacaaaaataaacaaaaagatgtaacgaatgaatttattttgcaccggagcaaatataaagagatatagtcctgccaccccaaaagtaagaacaggaaacagccactcaaaggataaagaaatgatataaccgataatcataacaatcggcacaccgattaatgataatttacttctcatatgatttctgccccttttacttaaaaattggtgtgatgtaagcttcaataatggcagcggcgatcagcagacaaataattatgagcaccaatattccaatatgcctgaacattgaagccattatctttttttccttagaaaaacacagcctgatgaccaattcaacgcccttaaaaccaatggcgccacttaataataacgcgggaacttcaaatataccatgaggaattagcagtaaaaaaatctgataaaaaggaaccccgctatgcagattttctataatagagccgcttaaaataaacccgttggtgaataaataaaagattgaggtcaacccaaaggtaaaaaaacccgcggctaaaaacagacaagcgattgcattgtttttcagcagttcaaccgcgcctgacgagccgttgtaagacgcggttgaaacaaagtgatcggaaaaaaacgcagcgatcacaccgcctgaaaaaaacagcaatgacgcggttaacggaatgacggacgtcctgattgccggcaacatgcggttcatcatgtatagatactctcagccaattcttcaatctcttctaatgaatgctcggatgactgatactccgccgcaaaaacgccttcatgtataataccgatcgtatcacacagcgaatgcgccagctccaacaggtgggtcgataacaggaccgtatgtccctgcttgacgtactcctttaataacgtccgtatcgttttaccgctgattaaatcaatgcccgtcagcggttcgtcaagaattaatatctttggctgatgaatgagcgcggccgcaattgataatttttgtttcattccatgtgaatatgttttaatcagctgatttccgtcttgagcaagcttcagcgtctctaacatattctttatatactcatttgtccgctgagacggtacttcaaacatctccgctgtaaaacgcaggtattcgactcccgttaagtaatcatataaaaaggcatggtcgggcacaaaaccgatatcagccgatatttgccccccctcttctgaatccagttccttaccgtcaatcatgacgctgcctgaagtcggtttaagcaggcccgaaatgattttcaaagtcgttgttttcccgactccattagtccccagcaaagcataaattgagcctttttttacctcaaacgaaatatctttcaatacctgtttttcactatagtttttttgtatattcactaatttaatcattgttcgcaaacctttccgccatattgattctgcgaagaaacagaaacatgactccatagtttaatagtgtgaacaggacaaaaatacctgatgcagaatgaataagcatcgtttcaagttccggctttttatagataaaatacgacgtgatcgcagcgatttgaagcgacacaatgaaaatgaaagatccgtataagttgttatacgtctttgctttccccgcttctccaatttcgtacatatgctcccagtttttcttaggatacagggcggtgcttgaaatctggacaagactgtataaaaaacccgaacataaaaacacaataaacaagtaaatcgtcagcgcagcggaagacggaaaaaacaccgtaatcaaaatggtgatgatgaacgaatagataagagcggcgagattataaatacatactttcggaaacaccagctgccacgcatgtttgatatttcggtgaaacagatgctgattttttatttctccgtcaactgataatactgttttgagcgcatctccgacgagctgatacgaaaagttcgcaatgataaccgccgcagacacgatggcggctgccgaatacccgataaaatgatgcgatagaagcggaatacaaaaacctaaaaacagcatgaacaaatacagcatactgccgaagttcctgataaaaaacccgtcaattctcgataaaaacagcagatccttttgaaaaacggcatgaaatattttgttatttctatataatttcagctttggcgcaaattctgcgtttgtcaaaaacatataaggaataaggtccattttcttcagcgtggccgaccacagtttaaacatccccgccgttaaaaggacggcggccgcaaacgccgcagcgaaaacgagcacggaatgtgagcggaatgctaaccatacatacggcgtattcatgaggatgttccggaaagccggtgactccgtaaagcttgaaatatcctttgcggtatactccccaaacacgagaagataaacggcatacccgactgcaagcggaaccagcaggctgacgctgaataaaatgcctttcatgattttcaagtaaaacaatttgctccacatatttgtaagaagataaacaacataagaaaacagcatagataaaaataaattgagaagaaaataaacgaagcccaagaaaaatacgatgaccgccgcagacccggtcatgcctgcgcttgataaaaacaaaaagaccggaaaaacaaaaagataccatacgaaaatggtttttttgatcgcctggccggcaaaaacagaaaacagctgtaaaaaacgaaccttttttaattgatgaatgaccttgcgcgtatccagcagaaaggcattgtggtgttctttaaagaagccggcagcccaaaacagctgctcaagtgaaacggcgattaaaacaaattgcccccatgcgctgaggggcagctgaatcagttttgtcccgaatacaacaccgcatcccaggaaaacgagatataaacataacagagaaataataatggcagacagcagtttgctgttgagttgaggaatgccccaatcttcctttctttttcgaaacgatgacagggtattatatttgataagagccgcaatttgtttgactatcatactttcaatccttacatatgtatttgggagagaggctctttttgcagcttgtacaaaaagagcaattatttattgatcgattttaccaagcagctgcgtattttttgccgtatttcttaatcattgtttttgctgttgcaacgattgcataagaaatcgcgcctgcgcctgtaacgataccgataagagaaatgatagaagcaattgttgatgccgcatcaataatatcaattgcttttttagctgctgctgtagagatgccgagagtagaagctaattcagcattggctgagaatgcatgagccgccgccacgtttaattcagttcccgttaataatagtgcataaaccaatgttgctgcagcaagagccgcgccaaacaaaatgaaagactttttattagattttactaagttcatcataacatctccctactctgtttttttaatttataataaaattcagcttaattgactctctcccgagctaaattttatccgccataaaatagtttaagaaaatagtaaagagttttagtaaaacaaaacatccagtcaaaatgattctcttgcctttactgagatcggtcagttttcccgcagcagcataaagagccgcgattgatatgagcagaaatggatccagcagctgcagactcaagctggtgccgccggcagaatatataagcgaggaatcagccgttaagtagttaacaactgaaagaatcaacattttaaatgccgagattaaagaagtcagcgtatatagaagcaaatatatttttttcggtttttttgtaccgagaataaaagcggcaacgaataacagaaatccgcctatcagaatttccacaaaagttgtgaagatcataaacccttgcagaaacatgacaatcgtacgaacacttttctccccgatatcgtaggtattttctccgacggaagaataatacgactgcagaactttatctgaaatactgaattggaagagtaatgaacagatcaaaatgatgaaaaaagaacttaaaaatatttttttattgctcaattgacccatcatattatcatccttttcttacaaaataaattaactattctatacttttacaatttagtttaatcctatcaaaaaatcaatatcctttcgaaaaatatgactttagaacgtgttaacaaagagcacatctttcagagtttttggtgctatctaccctttatttttttttgaatttgcaaatagtatgatttagacaattgatttgaagttttaggaagaatctgtcgaaagagacgcaggatataaaaaaggagcatatcgtcatgtatcctccggatgtatgatcgccagcacctgatgatcttcccattttccaattatttttacattttttctcgcaatgccttctttatgaaagccagctttttcgagcacccggattgacgccttattgtgcggcatgactccggcttctatccgatgcagtttcagctcgttgaatgcataatcgactgccagcttgacagccttcgtcgcatagcctttcccgttatatttgccatctaaaaaataaccgataaaagcgctttggagggaaccctgaaccacctgaaaaaggctgatcgtgccaatcagggtctgatcctgaagaaaaatgccgaagctgtattcagtatcattttccgcattcttcagtgattattcaattcgttttttccggccttccagcgtataaaaatcctcttgtctcgacatggcaaaccgttcaaaaaacatgcggttttccgtctgcaaaaccagttcctgctctgcatcattcaagcggagcggcctgatatcaacgctgtttccttcctgcatatgcatcgccgtccttttgttttgatcagaaacgtttttttaattgcctctcacccatatgatacggtacgctttatcgcatcaagaaaattccaagaccttacgttcacctttcctttcgtgacctatgtctgatgtgagtaaccgaaacggaagcacaaggttcttttgttgacttaaaccgtgctttaagccgtatcatcatattgtgacaaggaaagaatagttttggcgggtttcccgatgatctaaaaatcaattttacagaatcactgctgtcttatttcatgcctatttgcgggatgaatatattgattggattaaagctgaaatgttgacaaagaaatgtaaaaacaatcggaaaagaggagttaatatgaaactgacgggaaatacaatactgattacaggcggaaatgccggaataggattggctttcgcagaacggtttttaaaagcgggaaataaagtcatcgtgaccggacggcgtgagcacgctcttcaaaaagcaaaggaaacattcccggatcttattacatatgtcagtgatttgagcattccatctgaacgtatatcactgtttgattgggtgaaaaaaaattatccggaagtgaatgtgttagtaaacaacgcggggattcaacaacgttttcatgtgctgaaagcggatgcgaaggacaattgggactatttcaataaagaaatcacaacgaacattgaagctcccttccacctgtctatgctgttcgctccgttttttgccggaaaagaagatgcggctttcattaacgtctcttcgggattggcttttacaccgcttgccattgcaccgatctattcagcaacgaaagcggcgcttcattcatttacaatgagtctgagacatcagctttctgattcatctgtagaagtgattgaagttgcgcctccggcggtgaatacagatttaggcggagcagggctgcatactcaaggagaaccgctggatgaattcgctgatgggatttttaaaggactgaaagagggcaaacaagaaatcggatatggttcttcagaagaacggctgcgcatgtcacgggataaagccgatgaacataccgctaatatgtacaatgcgatgaaacatacaattgaataacctctttgaaaaaggaaaacccgcttctgttgagcgggttttccttttattaaacagataaacgcctttcttaacaatggtgcaaacgccaccgaaagaaagacgtcatattttttcatcctaagaatggcgggttgacccttagcactcttccggcgtaccggcgtttttggccgtgcggaaagatgaaccgcagccgcaggaagcgatggcattcgggttgtcaatggtgaaaccgccgcccatcatggactgtttgaagtcaatgatcgtgccggtcataatatcaaggctttcgctgtcgaccaaaacggtgattccgtgctgttcaaacatgctgtctttttcgcctttttcgtgctcaaatcccattccgtaagacaggccgctgcagccgccgccttttacgcccacacggagaaacgcgttttcttcttcatgctctttcatcatatcttttatatgcaaagccgctgcttcagtgatggttactggaacactcataggtagacctcctttttttaaaaacggatgctgatatctattataaaccttgaggagagtatttctcaaacgagctgtttacaaataatagacgccgctgcatacggtttcggcgggtcccgtcatcagtacgtgcccgttgtcctgccaattaatcacaaggtcgcctcccgctaaatgaacggtgatatcccggtttcgttcggaaacaccgttcaatacggatgcgacagccgccgcacaggcgcctgttccgcaagcctgtgtaatgccggagccgcgttcccatacgcggaaatgaagttcatcggcgctgacggtttccacaaattcgacattgacgccttccggaaatctcgggtctttttcaatgacgggaccgagcgttgtaagaggcgcttgattaatatccgcaaccggaaaaacaatatgggggtttcccattgatacggctgttccggaaagctccgtttctccaaaaacaaaggtttcatcgatcgtccgttcatcttcattgccgagcatcggcagctcttttttggtgaggcgcggttcgcccatatcgacggcgacttcacacacaatcccgttgtcctctgtaatgtctgctttcactagacctgaaagcgtctcaatgaaaaaggacgtttcttctgtcagcttatgttcgtatgcgtactttgccacacagcgaaggccgttgccgcaattttccccttctgagccgtcattattaaaaatccgcattttgacgggcgctttttctgacggacagatgaggatcattccgtcagagccgatgcccgtgtgaatgctggacactttaacggcaatctcagccagccgttcttccggcagctgttcttcaaattgatttacatatatataactgtttccaagaccgtgcatcttggtaaaacggaatgaattcatatcggcctccaactttttttcttttacttagtataaaagctcttctgctaggacacaatacaaatatcccccgtttttcatacataaaagctccctgcatatgcagggagcttttatcgtttactaaataaacatgccggcaattgccgcgctgagaaggtttgcgagtgttcccgcaataaccgctcttaatccgaggcgcgcaatgtccgaacggcggcttggggccaaaccgcccagtgtgccgagcataatcgcaatcgaagagaagttggcaaatccgcacagcgcaaagctgataatcgtagacgtttttttagaaaagtccgcaatatgcggaccgaagtttgaataagcgacaaactcattcagcacaagtttctgtccgatatagcttcccgctccgagcgcttcatgccaaggaacgccgattacaaatgcgatcggtgaaaacacgtaaccgagaatggattctaatgtaatatgtttgaaaccgaaccagccgccgattccgccgagaattccgttcactacggcgatgagcgcgacaaacgcaagcagcatggcgccgacatttagagcaatctgaaggccagtggacgcgccttttgccgctgcatcaatcacattagcggcgccttcgccttcttcgtccatattaaaatcgccttttatcgtctgcgttttttccgtttcaggtattaaaatttttccgaacacgagaccggcgggagccgccataaagctggccgccagcaagtattcgatcggaatgcctaacagggcgtaaccgaaaagcgtcgaacccgctacagccgaaaggccgctcgtcataatcgtaaacagctcggaacgggtcaatcccgcaatcagcggtttaatggcaagcggtgattcagactgtccgacaaaaatgttcgcagccgccgcaagcgattccgttctgcttgtcccaagaagttttgacagtccgcctccgatgacgcgaaagatgagctgcatgattttcaagtgatacaaaacggcaatcagcgctgagaaaaagataatgaccggcagaacgctcagcgcaaaagccgggctgctgcccacttttaacagcgggccaaaaataaagctgatgccttcgttcgcataatcaatgagaagctgcacacggcttgagaaccataaaaatacggcccgtccggcgtcccactttaatacgatgaatccgaaggccatttgtaaacataaaccgacaatgacggttcgcaggttaattttgcttttcttctctgataacaaaaaagcaatggctaatatagcaactgccccgagcagcccccaaacgatattcaatgaatccacctctaaaattttatttaaaaaaagtctttattaagataacaatatttatttttgctgtctacaaattttttattttgccaaaacccggggcgcaataaaaaagagaccccgttcggagcctctgattaaaacatcggattttcttctatgaatgtatatatgttgtcaaccagttcagcaggcgtgcctcccgtgaccacttcgccgttgaccagggcgaacagggactccatgcatttcccgcaatagcttaaacagccgtattcaagcacgtccaagttcggatccttctctaagatctcaagtgcttcctgggaaccgcgcgctaaattgctgacacagaattcaatcatcggattcatgcggtttcacctcacatatgtaccttatcctaacggaatttcctctattcgtcaaagatccggtttcacgctcaatgttatcgtaacatattaattcaggttaaaggttttactattacgtgttttctggtcaatttgtaggttattttaaaactattattgtggttttagatcaaattcgatataattctagatgttattttacatagttcgttattttgtaacaacattgactaccatatttttcgggcaaaaggggaatcattatgaaaaaattggtcttgatcggcgggggttacggaaacatgcgggtgctgcaccgcttactgccgaaccagcttccgtcagatatatccatcacgctgattgacagaaacccgtatcactgcttaaaaacagaatattatgcgctcgccgccggcacgatttctgatcatcatatcagggtgtcttttcctgagcatccgaatctggatgttcaatacggtgaggtggcttccgtcgacacgaaaaacaaacaggttctgtttcatgaccgcgaaccgatttcttacgatgacgcggtgatcggactgggctgcgaggataagtatcataacgtgcccggcgcgccggaacatacttacagcattcagaccattgatcagtcacgcgaagcctatcaaaagctgaacaacctcggcgccaatgcatctgtcgctatcgtcggagcgggattaagcggcgtggagcttgccagtgaattaagagagagccgtgacgatctgaagattatgttatttgaccggggcgacctgattttatcaagctttccgaaaagactcagcaagtatgttcagaaatggtttgaagaacacggcgtcaccattatcaataatgcgaatattacaaaagtggaagacgggatcgtttataatcatgatgaaggaatagcggccgatgccatcgtgtggacggcgggaattcagccgaataaagccgtcagagaactggacgctgaaaaagatccgcagggccgcatcgttttaacaccgcatcacaaccttccgggcgatgagcatgtttacgtcgtcggtgattgcgcgagcctgccgcatgcgccgagcgcccagctggctgaagcacaggcggaacaaattgtgcagatcctcctgaaacgctggaacaatgaagagctgccggaaacaatgccgcaatttaagctgaaaggcgttctcggttcactcggaaaaaaagcgggcttcggtcttgtcaacgaccgtccgctcatcgggcgtgtgccccgtttattaaaatcaggccttttatggatgtacaagcatcataacggctgataagaaaaaagccgctgattgcgatcagcggccatttttaagagcccgcaacatagccgcgcttttccatttcttcatatatatcttttaaatgcggattcccttcccccacaatgacatcctccaccagcacgagcggatagaaaaattcatcgtttctgatgcgctccgcaagttcttctgtctccttttgctgaggcggtgcgtcaatatcaatataccgcatatgaaaaggctgttccggatatttccgttgcagcgccgcctccagccattcaaacgtatctttggcgctcggcatattcacgcagcttgcgcaaagcgtttcagcgccgtaaacactgagcgtaaccggcttaatcatgtatatcatcccctttacaccagtatacaaaggacggggcagcttttgtataaaaaacggtttttatgttcaagtttaaatatgctataatggggaaagcagctttgcaaaccaaacattagatttttaccgttactgtgaatataatggttttatgtatatgaaaggagcgaatctcatgactgaggttgaaatgaaagagcaagtacaggaagtattggataaattacgtccgtttctgcttcgtgacggcggtgactgtgagcttgttgacgtagacgaaggcattgtaaagcttcgcctccttggcgcatgcggcagctgcccaagttcaacgattacgctgaaagccggaatcgaacgcgcccttcttgaagaagtaccgggtgtcgttgaagtagaacaagtattttaatcataaaaccaggctgcatgacagcctggttttttattttttacaaatagtcatcaaaccatgaacaaatataacggatgcgtttcatccgctgttccggatggccgcttctcgacagctcatgcgtggctttcggaaaccggatgaacgacgtcgttttgttcagtttcttcaatgcggtaaaaagctgctccgcctgctctatcggacagcggtcatctcgttcaccgtgcagaatcaaaagcggcgtcgaaacgcgggacgcatattttacaggagaacgatcccaaagcttatccgcttcctcaaacaaatcatgcccgagctgccagtcggtaaaaaagaagccgatatcgctgacaccgtggaagctgaaccaatttgaaatggagcgctgcgtgacggctgctttaaaacggccggtctgcccgacaatccaatttgtcataaaccctccgtagcttccgcccgtcacaccgagacggccgctgtcaataaacggatacgcctgaacggcttcatccaccgcctgcatgacatcacggtaatctccgcctccgtaatcacccctgacacgattgacaaaatcctgcccgtagccgtggcttcctctcgggttgacatacacgacagcatatccttgtgcggccagcacttggaattcgtgaaaatacgtatggccgtacatcatgtgaggcccgccgtgtatgtatagaatgagcggataagtttgatcctcttcaaaaacggcgggctttaaaaaccagccgtttaccgtcagcccgtcctttgtttcatattgcagcttttccggcacggatatgatgcgctcctcaataaaccgatcattgtcggatgtcaattgcttctcttccccatcttcgagcgaaatgctgtaaagctcggaaggctgtgcgggtttggcaatgacagcgatacagcttttctgatcaggatgaaaagcaaaaccgttcacatactcttcttctaatcggatcggatatacgaggccgtcaatcgagatataataaataccggtgcttccctgctcgctcccgagaacgtaaaaaccctgcccgtcgtttgtccataccggccggggcgtcactcctcctatgattgaatccgcaatcagcgcatcgctcaaatgaacatccagcatgtcggtcaggcaggacagccgctcagttttcacgtcgtacagccacgctttttctaaagtcgcattgcgaaattcattttcatggccaagcatcgcgatataagaaccgtccggtgaaaacacgcaggaaccgaaagaaccgcggtgcggcgtaatctgcttcaggcttccatccgccagattcatcagatagacatcgctcggctttccggcgtcacccggctcgcataaattggcggtaaacgcaagctgcctgccatccggtgaaaaggccgcgccataatgatccgcttcatgatccgtcagctgccgaatctcccccgtttcaagatgaatcagcacaagctgggcccagcttccgttcagcaggcctttcccgtcacgtttatatgttaatgactgaatgtcaaccggctcatactcgtcatgcttctttttttctttctcatcggcgcgctccgctgatgtcagactgacggtcacaagcacggatctgccgtcgggcgcccatatcggatctgatacgccccaaggaatctcggccgcctgctccgcctctcctccggcagcgtcgatgatgtacagctgtgggatgccgttctccctgtcagaaacaaaggcgaggcgccgtccgtcaggtgaccaccgcggacttgtatttctgttgtccccgaaagtccacgggtttgagatgccggattctgtgtcatataccataatggctgaggaataggaatcacgcttatgattgactgttgtccggacgtaagcggctcttctgccgtcaggggcatattgcgggtctgtcacggatatgagagtcgcaatgtcctcctcggttatgagttttttcaatcgtttctcctccttttcttttttatttcgcttccctaaataaaaatccttctccagaaaaagaaagcgtccttctctgatgggaagaacgcttttttatcattatacacttttcacctgttctaaaggattccgttcaattacgcttccttctgacgggacggtaagcgccgcaatctcacagtgggggaaatgctcagaaagctgttttctcagctcttctccctttcctttttcaatcaggacaagaatcgtcggtcccgctccgctcagcgccgttccgtaagcgcctttcatttcggccgcatgttccacctttgaaagctcaggaacaagcatggcgcggtacggctgatggaggatgtcttttctcatcattttcccggcgagcgcccagtcatttgacatgatcgcagcaacgagaaggttgctgacggcgcttgctttaacggcgtgccggtacggcagctctttcgggagcacgtctcttgcgtccctggtcagaacttcgtaaaacggaatcactgccacaacgtcgatatccgcttcggccacacgcacgatatgtgtttcaccttcttcgtgaaggccgatcacaagccctcctgcaagagaagcagcggcattatcaggatgcccctcttcaagactggctaagtgcagcttgtcgctttccgaaagctgcaggccgcataactcatccgcaagctcaatggcggcgacgatagcggccgcgctgcttccgagaccccgcgcaagggggatgtcactccacactttgacatgggcgggcggcagctctttctgatagcggtcagccgtccgtttggcgacttggtagatgaggttgtccgttccttgagggatgcccgcgacagtttcggtttccgccgagaactgccattcatcgtttcggaaaaccgaaagcttcaaatatctgctgagcgccatcccgacggaatcaaacccaggccctaagttggcggtgcttcccggaaccgtaatggaaaacagcatctccgcctcattcatacacgcgccgctccatttaagtattccagaatactgtcctcatctgtcggcagcgtgatcggttttatgtcagatacgtctacagccgtgttcggatctttcaggccgtttccggtcaaaactgcgacaaccttgctgccttttggaatttcaccggattttacctgtttcaaaacgccggcgatggatgcacaggagcccggttcggcaaacacgccttcttcacgggcaatcagctgataagcgtgaagaatgtcttcatctgtgacttcatcaatttttccggctgattcttccgcagcgagcaccgctttgtcccagctggcaggattcccgattcggattgccgtcgcaacggtctctggatttttaatgacttcgccgcggacgatagccgcagaaccttccgcctcaaaaccgcgcatcttcggaagtccggtgccgtttttctcatggtattctttgaaccctttccagtaggccgtgatattcccggcgtttcctaccgggatcgccagaatgtccggcgcttcgccgagctgttcgcatacttcaaaggccgctgttttttgcccttcaatccggtaagggtttactgaattcactaatgcaatcggtgatttttcgcaaatcgaccggacgatggccagcgcgtcgtcaaagtttccgtcaatcgcgatgatttccgcaccgtacatgacggcctgcgcaagttttccgaaggcgatttttccgtccgggatgatgacgatgcatttcatgccggctctcgccgcgtatgccgcagctgccgcggatgtgttccctgtagaggcgcacatgatggtatcattgccttcttctttcgctttggcgaccgccatgaccatgccgcggtctttaaaggatcccgtcggattaacgccctctgttttcacatgcagttcaattccgagcttttcggaaagtttcggcaggtgaatcagcggcgtgttgccttcatgcaatgtcagggccggcgtctgatccgtcaccggcagaaattctttatattgatggatgagtcctttccacattagctccaaccgttcccttctacgcgatatgtgctttttacttcttgtacgacttcgaggtcatttaagttttgcagaatgtcactgaaatcttcttccgatgtatgatgcgtgacgatgacgatttccgcgaggtcgtcatggcctttgatcggcagctgcagaattttttcaaagctgacgccgcgctctgagaaggccgatgtgatttttgaaaaagagccgacctggtctttgacgtgaattcttaaaaactgctgggcatagatatcagacggctgcttcagatttctttcaaactgcggggcgacaaagctgtttccgtttacgccgagacgcatgtttttcatgaccgcgaccagatcggaaacgaccgatgtcgcagtcggcatgcttccggctccggggccgtaaaacatcgtttcgccgacggcttctccgtacacgtaaacggcattaaactcgttatgcaccgcagagagcggatgatgatccgggagcagtgtcggctgaacgctgacttcgattttattgtcatcacgctgggcgatgccgatcagcttcatcgtatagccgagccgtttgctgaagctgatgtcttcatccgttatccgggaaattccttttactttgacatcgtccagatcgacattcatagagaagccgagacgggctaaaatcgccatcttgcgcgcggcatcgagcccttctacatcggcggtcgggtccgcttccgcgaatccgagatcctgcgcttccttcagcacttcttcatacgggcttttttctttaatcattttcgttaagatgaagtttgtcgttccgttgacgattcccatcatttttgtgatccggtcagaggaaaggccttcttcgagcgtgcgtaaaatcgggattccgccggcgacactcgcttcataatacaagtcacagccattttcctttgcggcggctaaaagctctgacccgtatacggcgatcagatctttatttgcggtcacaacatgttttttcgctttcaaggcatcaagaagatattgcttcgtctgttcgacaccgccgatgacttcaataatcacgtcgacttcagggtcatcgatcacatcatagacctctgtcgtcagcacttctttcggcagatctgcgtctcgttttttatcaatatctttaactagcacttttttgatcgtcaccggacagccgacctggtgcataagcttatcctgatgatcttgtataattttgacgactccgcttcccacggttcccagtcctaacagtccaatacgaatcgcttccaaagagaaactccacctttcttccttttgtccactagaaaaggacaattgttaacccttcacagacatttaagttacaaatattatataagcccgcatttgttttgacaagcggctgaatattgtttctacggctatgaaaacgcttaacacactgatatgacaagattccctattttctaaatatttttacgtcatattttcttacgaactgattcctttcccgagccacgccacaggcgggacaaaaacctgcgccgacctgacattcatcatgttgtgacatgtctgtaaaaactgttcatagcgggtgcagtcggcaagaatgtagtcaagctgctcttcgtaatactgtttttcagaatcatgagaaatgtaatagctctccaccgtctcgaagaaatggagcggaaacagcaggcggctgtaaaacaggcgtttggaaaaggaggataacggcgtaacttgctcatattcctgcagaaacaaaaacccatctttgagcaggtcgtcacgatgatacaaatatgtgctgcgcatatattccgcaatatcacgggcagcatggtcgaatacccaatcgcccggaatgcggatcaatgattcctccgaccaggtatcccgttccatccgctgatggcagattgtccccgagtcttctgcgccgggattgtcatccagctccgtatccactaaatattgaatggcgttttccgctaagcctgaataataaggaaatgcttcgatcattttcttttcgaacggttcaagcggagacatatgaattttctgcatccagaatgattccagctgatccacccgttttccccataagtccttccattggccgatcctgcccgcttctttcacttcgtacggataaccccgcccttttctgtgaaattcggcaagctcccctccgacagaaaacgaccggtttgagacgggaatcggcgcttttaagagcgcatacgttttgccttcgtcctcaaaggtcagttctccttccttcgtaaagataaacactgaaacgtatgggtcactttgttcttgtaaatactgactcatgtagtaaagctccgtcagctctgattgcgaaaacccggaaacgggaattataagaaagaaggaattaggcgtctggaagcattggtatttctgataaacggaaagctgtctgacgtggatgccgtacttttctttaatgatgcttttcatcataatcacctgcctgaaaaattagagctattcacatcgtagtcatacgccggcggaattatgaatacatattgtaatcctttgaatcaagtggagaaacatcgtacacatcggaagagtgttgtataaactagtaaaaaaagattgggtgaagcaaatgtcagaaaaggaacaactgaatcaggtggaagctgtcgccagggcgcgtttaaaagaacggggggttgagacggacgatattgccgagctggtgtatttccttcaaaaaaaatatcatcctgatttgacgatggaagtatgcaggctcaatgtggatcgtgtcatcgcaaaacgcgaagtgcaaaacgccattttaacgggaatagaattagatgtgctcgccgaacaaaaaaagctgtctgaaccgcttcagaccattctggcgattgatgaaagcctgtatggggttgacgaggtgctcgccttctctatcgtgaatatatacggctcaatcggctttacgaattacggctacattgacaaagaaaaacccggtattctcgggcggttaaatgataaatctacgggcgaatgccatacgtttcttgatgatatcgtcggcgcaatcgcagcagcggcttcaagccggcttgctcacagcgcaagaaatacagaataaggacggccgtcatggccgtccctttttttatagatgttcaatccattcggttaaagagtcaatcgcatatgtcggcttctggccgtaatctgccatatgctcacgctttgtcactccggtatgaaccagcagcgtatccatgcccgcattgatgccggccataatatccgttgcatagttatcgccgaccatgagtgtttcggaaatatccgttccgagcacacgcatcgcctgttccataataatggattcaggcttgccgataaagacaggctcaacgcccgttgacaccgtcaaaacggatgtgagcgaaccgttccctggtaaaagtcctctttcagtcggaatggcgacgtcgccgtttgttgaaatgaaccgggcgccgtttctgatcgcaaggcatcccgttgccaacttttcatatgtaatgccgcggtcgattcccacaacgacaaagtccgcgttttcttctccgaagctcagcccgttttcttcaatggcctgacggatgccttcttcgccgatcacatacaccgacgcgtcttttttctcctgggcgatatgctgcgcagtcgccatgctcgtcgtgaagacctgctcttcagatgccggaatgtcaaagctcatcagcttgtccgccacctgcttcggcgtccgggaagaattgttcgtcacgaataaatacggaatgccgcgcgctttaagcgttctcacgaattcacacgcttcttcgattttttccgtcccgttgtacattgtgccgtccaaatctatcaaatatcctttataatccttcatactcaacactcctgtggattttctcactcgttgttatttaaatgcggaaacaggccctaattctgtttccagataggttcttacacgggccggaaaggctttcagcacatctctgtttgacgtgatcagcgtaaacagctcttgataatcggcgtgctgatattcctggacaagctgctttctggaagagatcagttgcttcagcttatttccttcatcctcagctaccaccttttcatccgtcagaatatccatgatgtcgtcataactgcccggatcgcgcatgataaagccgtcaatcatatcatttccgacatcgagaatgcattcgatcataagatggctgatccgctcaagcgcccttttttcgatctcgctctcccatgcaggcgtgctgtcaaacagcgccagctgggtctcaaaaaaacggagtgtttgttcgatattatttctgtcaacaaaatacacgtgacagcatccccttctgcatcaattattttctgattcgttttaaaacaaaatacgcgcagccgaaattgcagtattcgtaaatgtattcgtccaatgtgctgattttcgtttcaaaggttgctttttgattctggtcatcaaagaagcctttgagccgcagctgactgtatccccagtctcccacaatgtaatcatatttatttaatatgtccgaatagcgggctttgaacgcttcttcattaaagccgtttttaaaatcgtgtacgagttcaaactcggcattttgaataagaatcatgtcttcacctcttttatcactctttactatcataattcattgacttctgtccatcaattgcaaaatgagacggttcggacggacggagaatttttcctctttatatccagtgtagcggttcagacgatccttattcaagaatgactttttccctgcaaaaacggctccatcacaaaaaacccaaaacctgcggcgttttgggttttttcggcttatcttatgcttgggcctggcgttttttagacgcttcgttcacttgttcatccgcatggtaggaagaacggacaagcgggcctgcttcacagtgactgaagcctttttgcatcgcgatttctttcagttcggcaaattcgtccggatgataatatttttggacttttaaatgttttttcgacggctgcaggtattggccgatcgccatgatgtcgacattgttcgcaagcaggtcgtccatcacttcaataatttcttccttcgtttcgccgagaccgatcataatgcttgatttcgtcgggatgtcaggctgcatttctttcgcacggcgcaagaattccaaagaacggtcatatgttgcgcgggcccggactctcggtgtcaggcggcggacggtttcaatgttgtggttcagaatatcaggacgggtatccattaatgttttcaggttgtcgtaatttccgcccatatcggatggcagcacttcaattgtcgtgaacggactttttctgcggatcgcccggaccgtttccgcaaagacgcctgctccgccgtctttctgatcatcacgcgctacggccgtgatgacggcgtgttttaaattcatcagcgcgacggaatcagctacgcgttccggttcctgcagatccagctcggtcggcagacccgtttttacagcgcagaagcggcatgctctcgtacagacggaaccgagaatcatgaacgtcgccgtacgtctgacagcccagcattcatggatgttcgggcattttgcttcttcacatacggtatgcagattattttcacgcattaattttttcagacccgtatagttttcattcgtgttcagctttattttgagccattccggctttctcagatgctcgtctttctttgccatttccccatcatctccattatccctttattcatgttcgtgtgcgaaaaatttctatttcacgatggatataaaacttgcggatttctattcaatagtcactttaacataggaaaaatttctcgacaagggaagagaattacttacattttctcggattgttgccgcaaactatttgtattcaatcctgaaaggagatcatgttgtgaaagttctgttatctgctcttctccttttatcagttttctgtccggctgcaagcgggaaagaacaatcggctcctgtttacggcgaacggatgcagttgtaccgcaaagccgaagcagtcacgcagattccttggtatgtgcttgcggcagttgatcaatatgaagaaaatgtccgctcaaaccgaaaggatctgccggaaaaagcgggaatcatcagcatttatattccggatcatttgtggagcggccctgaaaatccaaatcctaaggacgatgcgcctctcagcattaaagtatttgacgggatcggcctggacggcgacggcgacggaaaagccgaggtaagcaatgatgaggatatcctttatacatttgctcagtatttagcgggattcggaaccgatcttgaccatatccgcatcggtctctggaattattaccgccgcgatcagacggtcggcattatcaccgaattcatgacactgtttaaaacgttcggccgccttgatctcggagagcacgcttttccgcttcccgtgaagacggattacagctaccgcagcacatggggcgccgcacggggtttcggcgggcgccggattcacgaaggaacggatctgttcgctcattacgggctccccgtcagatcaacctgctacggtattgttgaaatgaagggctggaaccgtttcggcggctggagaatcggtatcagggatatcaataacacgtatcactacttcgctcacctgaacggctttgcaaaaggtgtgcataaaggccagatcgtcaaacccggagaggtgatcggctctgtcggcagttccggatacggaccgccgggcaccgcgggaaaatttccgccgcatcttcactacgggatgtataaagataacggcagatcggaatggtcttttgatccgtatcctcatttaagggcatgggaacgtaaagaaatccgcaggaaaaagtaaacacacagccgccgggaaagattgcggctgtgtgtttttatttatctttcttctgtttttcactcggcagctggacggaaggcgtcacacctgacccgccgcttccgttataaaactgcggcacctctccttgaatcgctttaatggagaccggaatattatttgtcacgactgatgtcttactggcaaacggaataatgaccttcacttttatttccacaaaaatactgatatcgatcagggcattgttaatgccgtacggctttatttttgttttcacatcagttaacgcatcaccgatcaggttaaagcgcacggggattttcggccccagatttccgagaatgctgtttcctgtgacctgccctaagggaatatcgatcataatttcatcggccgttttcgcgcctttttccgtttcacgctgcttattgttcgactccgcttccttcagatgagcctgaagctgctttgtcactttcgccttcatactgttgaccatttgtgtattaaaatccatcgttgtgacttttccgttttcatccgttttcatatcgaccatatctttcacattgtcgctgtgagacatgtattcttcaatggattccgtaatgacctctgtcgccacccgtttggtttccatttctcctatgttcatcagcaccggtttgattgaggagttgatcatccaaaggctgatgaccgtcgatatgataaaaaaagcaaacgacagaagaagcacatatcgaaaaggcaaaggccctctcttgcgaagagcgctccggtatctaggcaagaaaaatccccccttacatatcacaatgtatgcttgtaagaggggacatagtattttatttttgctcttaaaaagtcccgctttcactcattcgggtgaaatggaacggcgggcagctacatgacattacggctgctgcgcgagcttccaggcgagcagatcccttaaaaactccggcataaagtattgcttttcttttgaatcgcggatgtaagggaacagctttccgagtgtaaacatatcgagaacggcaaccgagtatatccgctccggatcaatctcttctccgttcactttcacattgaggagatgcgtcacaccgtcttcaagaatgccggcctctgcctccgctccggcatataccatcctgcccatcacttccccgcggaagccgaggccttttatccgcagctgctccatttgttccgaggcggcctggctgattgtttcctgaagttctctgcctgaaagacgaacggccaccggattgatcggatgagggcagatacggtgcagatcaagctttgtgacaggccccttctgtaaaggccccaaaatgacgcctgaattcaccatgctgacttcacagccgcaccagcttttcagcgcttcggctaatagaagcgggaggggcgattcctcaaaccacttcacgccggcttcttcattcaggttggcgacttgttcggagagcaggttttccgcttcccgttctttctctttcagaaaagccgccgtatcttcacattccccttgccaatcagccattttctgtacagatgcctgtttgctgacaatggttcgtgattcactttctatcgtcagctcgacacagccgacatagttcccgtatttctccgcacatgccagcaatacgccgtttatgtcttgtccgtcctcaagaaggtggtgcgtatgtgattcaagaatgacatcgatatcgggaaatttttccgctgcggcccggtcatcgatcaggcctaaatgagaaagcagaataatgatgtccgctttgcccttgatatcgtcaagtgattcttgaatgcttttttccgcatccgtcaccgtccagcctagtttttgatagacgggataatacggcaccgtgacgccgagtatgccggcggtcatcccatttttcagcgttttgatcacgtagggctcggcccattccgggcgctgtccatccgcgtcaaacaggttggacacaatgacgggaaacgcggcatgggtatataaatccgccagctcatcgtgaggcagcgtaattccttcattattcccgacggcagccgcatcgatctcaagccggtttaacaagtcgacattcgctttgccgaaggtcgcttccgttatcatttggaatcggtccatatgatcgccgatgtcgaatacgagtgtttcctccccgtctttttcatgttcatttctcttctgctcaatataatgtacgattttcggccaattttcgaaatggctgtgcaaatcattcgtatgatataaacggagcttctctaacataccatctctcctaccttttagctgaatatcccttgataaatcaattcacagccgatcaaaatcaagacgacccgcatgaaaagcacgatcgttttcgtctgcacccgcttattgacccacgcgcccattttgccgccgaaccacgcgcccggaacgaggcacagcgcatacagccaattgacatggccctctgcgatatgtgacacggaacccgtcacggaggataagaaaataatgagcattgacgtcgccacagccactttcggcgggaacaaaaataacagcatcatggccggaaccataagagagccgccgccaatgccgaaaagaccgcccaataaaccgacgaaaaaggcaatcacgataccggtgaaaatacggtacgaatatgtataaagctcacccgattcatcctcatatgtccggatcatgcctttatgcgctttattgaccggttttgctttcgccttcagcattaatgtaatggaaatcaaaatcataaaaagtccgaaccagacggaaaacgtatgcgcattaaaaagtttagacaaatacgcgccgatgatgcttcccgggccggaaccgataaaaaagatcagtccgcttttgtaatcaacggttttatatttcatataggccagagttgatgacaggcccgtaaaaataatcaccaaaagggacgtgccgatggcagtctgcggtgttacgtcatggaaaaacggagtcatcgtgcttaaatagagcattgccggcacgatgataattcctcccccaagcccgatcaggctgccgaccgttcccgcgataaatcctaatatgatcaaaataagataagacatgtgtcttgaaacctcttttctagctgaataggtcgagctgcttcggagcaagcccggtatatgagatatttaacatttcaagcatctcaagcccgttatcggcggcgtctccgcctgagttattattgaagagcacatacagattgcgcgactgttttttcagcacctgaagattgtttttccaatctttgagctcctgtttgttatagcggtataaatatctgacctcacgccagttttgtccgccgtctggtttgatccagccctgcttgttccgcccgtgaaaacggacaagcgttttttcttcatccgttgctttcaggacggtcggaatgctgccctcgccgatttgcggctcgtcacatatgctgtgaatccagccttcctccttcataaaggaaagcgtctgttcataaaatggcggggaaaaccaagaccggttgcggaattcaagcgcgcacgggatatcgcccatctgctgcctgcaccatcttaaatatgcgacgttttctttcttgcagtcaaaccacggcgggaattggaacagcaccatggcaagctttccatgctctatatacggcgataatgacagcttaaacgcctcaaacatttcttccttcgattcatagggaatatcgccgcgctgatggcccgtcattccttgatatgccttaatgacaaattgaaaagattccggcgtctctttgacccatctttcattattgcgggcgggctgtatcgcgtaaaagctcgcgtccagctcaacgatgggaaaatgagaggaatacgcctgcagtttttgcgggcccgctgttttaggcggatagatgctgtcatgatccccccaccccgtcagtccgatataaatcacaatccttcacctctcactctagtttatcacaggtgtttttctctttccgtttccatgttttttctgaatgcacttttcaggaaccggtattgatgttcattggtgtccgaaaatgcctcatccctggatgaaagaatgtgctgatagacgatcggctctgaaaactgaccgctcgtgaaatcatatatctccccgtctatccggttataaaaatgccagcttgtgccggtttttgttttgagaatgtcaccgccgtaaacatcttggatgactaaagccgtcacgccgcactggcctttggccgggcaatcttccgtccattttgtactagtcttgggcgaccaggatgccgttaatatgttcaagatttggtcatacaatgtgttttactcctttttataaaaagataccacgagacccgctttccaaacgacaaaaaaaaccgattctcatcagagaatcggctcttttatttcagaaggcttcaggaatgttccgaaagccccgctctgcttacggccgccatcctgatacacacagcgtcccttgctgtaggtcgcagcaattcggtatggaaaggtgcggccttcatacaggctttgcttatgtttggaaaacatcgtttcttttgtgacggtaaaaggttccggccggacgatggcaaaatcagcgtcaaatccttcttcaagcaggcctttattcgttaaaccgaagcgcttggccggtgcttcggccgtccatcgggccacatgttcaaacggaatcccatgatcgatcgctaattgaatcatgccgagaagcgtaaattggcctccgctgatcccgccccacgacagaaacatattatcctcgcgtttcaaagacggatgacagggagaatgatccgaagacaccatatcaatcaggccctctgccaaaaccccgatcaattcctctttatcagcctctgagcggagcggcggagcgcatttggcggccgccccttttttgaggaagtcttcaaagctgaataataagtagtgcggacacgtttcaacggtgacatccaatccgtcttttttcgcctgctgaatggagagcacggcccgtttcgtgctgatatgtacaaaatgaagcgcgcatcccgtcgctcttgcatattcaatcgcccgctgcacagcctcgcattcggcttcttccggacgggaggaagcgtaagcgcgggcatcaattttcccttggagcgcgtactcggcttcaaggaatcgggtgagggcgtcgctttctgcgtgcagggccaaaatcttgccgcacgccgcgatttccttcattccctttaaaagagtccgttcatcggctgattgaaattcatccgttcccgatttagacagaaacgctttaaacccgattgcccccgcttctgccatcggccggatatgttcggtatatccgggcatcaaaccgccccaaagcgcaaaatcaaccgctgacttccgttcggcgatttccgcctttgccagcaggttttcagcagttaccgtcgaagggatgcagttaagcggcatatcaaaataagccgtacagccgccggcagccagcatgtttgagccggtttcaatgccttcccattcttctcggccgggttcattgaaatggacgtgacaatcgaccgcgcccggaaacacatacatgccgtcctcctgcaccacttgttccgcgttttcgtcaatgccgggtccgatcaaggcaattttcccgtccttgacggcgatatcagcccgctctgttccgccttttcgcacagctttcgcaccctttacaattacgtcataggccattttatcttcctccctgtaaggatgacgatttttctgtcagtttttatcacaacatgcgtctatgattgccagtttactgctactatgatcgtaatacatcagtaaaaccgctataatttttgatgatttttattcatattaaccaatggttgtctttagaacctgaaaggagactgactgatgaacatttatgacgtgatgaagattcccgcttatgagcgggccgcattaatcgcaggcagatccggcggctggagggaggtgcagcacgtcaacatgatggatgcgccggacatcgctgattttttacataaaaacgaattgctcgtcacgacggcttaccacttgaaggaccgcccggagctgttgaaagatttgatccgcctcatggcaaaacggggctgcgcgggactggggatcaaaacgaagcgttatcttaatgtcattccgaaagatgccgcggagcttgccgaccggtatgaatttccgattattgagctgccggaagacatcaggctcggagatatcgtcaacgccacactgagccatattcttgatatgcgttcaaatgagctccagcaggccatttacgcccataaaaaattcacaaaccacatcatgagcggcaaagggctgcaatccctgcttaagaagctctcagacattctccggcttcccgtgctgcttttggatcagcatacaaaactcttatcatcgtcccaccgcatacccattgacacgtctttattgaaaaacatctgttattccctttccgggccttatttcacctgcttttccatgctgtccgacagaaaggcgtattctgtcctgccgattctgaatgttgaaaaaaactgcggttatctggtgatacctgatctggtgcagaccgctgataaaggcatgattttgactattgaacaggcggctaacgtcatttcctttgaactgctgaaagaaaatgccgtcaaacaattcagcagacgggcgcgcaatgaatttttcagcaatttcatcgaccgctcgtttaccggccatgaagaaatcaaaagccgcgccaaagaattccggctccgctgggatcagaaatacatgtgcatttgcggaaagcttgaccgaaatgagaaaacgatcagctttaccgaaaatcagctcgtttccgatcatgtatttgatctgcttgaaggggagctgtcatcctttccgtttccccctcatctctttattaaaggaaatgtcggtattcttttaattgaagcgacagacagctggaatgaaatgcacgcgtctgtcatcagctttttggagcagtttcaaaagcaggtccggacgcaatttaaacggactgtctccttcggcatctcaaacatatgccaaaagctgatcgacgtccctgacgcttttactgaagcttcagacgccatttcatccgggcatttgtccagaagcgcggagtttattcaaatctatcatgccaaagacgtgccggagctgctccgcctgcttccggcggaagatgtgaagaagttttacgaagccaccctccaaagcctggcagaccggcaaaaggaggaccagagcctgcttcatacgctgtctgtttacctggagacccactgccagatttcagaaacggctaagcgcctgtacgtccatcgaaatacggtgatctatcgtttagaaaaatgcgaggaactgctcggcaaaagcttaaaagatccggagacgacgatgcgcctgcggctcgcgctgagaatgcagcggctgatcggttaaggaatcgttagagacagggatgcgggtgttctcccgcatcctatttaagggggattgattcagcttaattctcaaaaaatgctgccatcaacatctgcttccattgacatcatcagccgttagttatgattttcagcagactctaatctaaactaaaaaagcctttcccgaagaaaaggcttttgctgttcaagtctgaaaacgatccgaagcagtttgaaaggtatcatgtgttttttccactgtgttcacacccaatccgcatactaaagataacgacagacccaaaataatgaagatgctttttttaaaattcatacaggcattctccttcttaggtttgattacgatcagacgaaacttgatatgatccatcaaatgaaacagccgatgttgctagaccgacccctgacattaaaacgacagccgacacaatgataaatacgccttttctaaaattcatacaggcattctcccctctgaatttgtttttgcgtttgaatcattttttgatgataaaaataagatttgtcatattgctttgactctgcataaacagcagccgtatcaagagcaatatcttctacatacgaatagtttttatgtttctcaaggtaatcaattgtttttttgattcctatttggtctattgcattaatatataaagcctccaaatatttttgcagagattcaaacagcttatctccttgaaatatcgctgatgaaagtccctttttgctgatttgaatcgcctcgcttgttttcccttgtttaaatagaagctttgcgtatgtaaacaaggaatgtggaaggttacccaatttatacttttcagatatctccgctgctttttttaagtagatttcagctttactgtattcttctaagtctccgtaattctttcctatgttgtaataagcagaactgagcagcctttcattattgtttacttgtttcgacaactctaaagctttttctaaatgcggcaagcttttttcataacgtttaaagtctacatagttccctgatacgacaaatagacattgaattttccggaccttatacaactcatactgatcgtaaatatcgagcgcttgctttacgtgatgcatagagacgtggctttgtttcataccgtaatatgcttcagccagtttaaaatgaaactccgctctctcaatttcatcatgcacatgaacgagttgtttttcagcctctctataaaagccgatcgcctttacatactgcttttgatcaaattcatacatgccgcggaaaaataaagaataatagcacagcaggccggaaattcctttatttgatgcttcgattttttccaacagctcgtcaattgtcggtctcacacgggtagtcaccggttctaaataatccagcatgagctgatggcggaatttcatgagggtgtagtaaatcagtagatattcgtcttcttccatctcatttatttcttgttccacttccgctttcaaaatctccgcatccggaacactgaactgacgtatcattttgtaccattcattaatcttaacgccaacctccgatgatggtaaaacagaactcacaaggccactcctccttttatataatattctaacatttccaaaattatgtatatccgcaataaaaccgcaaaatttcattcgtcttgatcataaatcttggtttgagttttaagtctacaacaaaaaaagcagtccctatgcagcctgcttttttttgagaaatttatctaagatgaacataaataatgtgaataacagagacataatcaacatgtctagtatagttacattagaattttcttttactaagaagaaccagagaagttgtaaaacgaaagaaatcacaaaatacaatatgtacctgatactatttatgtcaatccatcccttcgcttatcttattgccctttacacctgaaccatgctggaatctcccggtaatgatgagtataatatatgcagaatgtaactggagctgatctaatcatctcaacttattttaaaatttcaaaacgtgcaatttcccactctttgtttgcttttagcgggattgtttttagctttttgcctgatttcaaatcataagacgtgatgtctccaagcttctgatcgcgctggatatcaaagtttttgagtaaaacatacatctctctgtcagtgaattgaacatcattcattaatttgttatcatcccccgcataaaaattgaaagagtttttcttaaccatttttttatcaaatatctgcagcttcccatcaaaagaaacagctaagatgctatcttttaatattttcaattttgcaggatgaaaccctttctccatctcgacttcttttttttccttaagagtctctctgtctattaatatgagcttagaattctctttctcattcacgttatcattaactgccagtacaaatgtattttcatctagagcttggaatgcatccttttcatccatgaagtatatccctttattcggtatggatgccttgttctcttgcttatttgtctctgggttaattgaaaggatggacatactttcttcatcacttgaaataacataaattttatttttagcgacgattgctgatccaagttctccgtcaagctttatttgtttcttgttttttcggctgttccccttccaatataccagttcactttccagccctttgtctgtatatccaacgttaatgtcatggatgatataaccgtcagaactatttataaagaaagcaccttcatcctcagttgtttttgacaaactcttttcatttattttgtttatttttccggttttattgtctatcatcaagtgattattgcttctatttgatagaaagaacgtattatttttgttatgtgaagacatcgtgaaatttataccatctttcaattccacgctatccattttaataccatcttcaccgtaaaccccaatctcacttcccctatctaaagtgttagaaaaaccaacaataaattttgcattgtcaatatcctttaatacagtcttttgattgctgcttctttcctctttttcattcccagttgggatgagaccgcaagaggttgtgacgatcagtatgcaaatgaaaataaacagggttttaagtctactcatttttttcctccctatgagatagcaaaaagcctccggatacacggaggctttgattcttatccttgctgcgtgaacggccgggtctgtgtctttttgccccagccaagcgcggccagaaaactgatggcgagaatggccgctcccagcatatacggaaattccatatttacgtcaaagagaaaaccggcggctgacggtccggcgatattcgctaagctgatgaatgaggtgttcatcccgccggcaaacccctgctggtcaccggcgagcttcgacagcatcgtattaacggccggccggagcagcgatgtcagcgtcaggaaaaagattgccgcggcaaaaacggcccaatatgaacccgcaaaccggcaccacacaagtcctgcagcagccccgatcaacgtcacgttaatgacgcgcttttccccgaacctgcggacgagataactgacgccgaccgcctgcacaaacacgccgatgagacccgcagccgtaataataaaggcaatatcagaggctttaaatccgtgtttatggtcaacgtaaaggccgaaaacggattcaaagttcataattccgaagttcagcacaaaaaccagaatcagcataaacgcgaacggcgatttgagcgcgcgtgacatttgcttaaacagatgctcacgtttttccgtttttgcccgggcttccagctgcttttcacgtcccagcgtttcaggcagaaagaaaaatgaaagcaccgttgaaaagcaggcgagacttgcagacacgatgaacggcacagacatgccgtaatgaaccaaatagcctccgacaccgggcccgatgacgacaccgagcgtcatcgccgcgctgaacagccccattcctttcccgcgttcttcttcggtcgtaatatccgctatgtaagcgaacattgacggcattaaaaacgccgcgcccattccgcccaaaaggcgggatgcgaacaattgccacaggcttccggcaaaagcgaagatcaattgtgacacggcaaaggcggcgatgccgaaaataatcagtttccgccgtccgtatttgtcggttatttccccggcaataggcgcgaataaaagctgtgtaagccccgccgccgcaacaagcagacccatcgtgctgcccgtcgctccgaattcggtaatataggtgggcataatcggaataatcaatccgattccaagcatcgcaataaacatattcagcattaaaattgacaatcggcctatgtacgccatgatttcttaccttctccccagacaaacggatgatcattccatatttgtcattttttataccattcagtataacggggaaaaggggaaaaagtccagatgatttcaatctcgttttcatgtctcatgacagcacaccggtttcagccggcagatcatatatgttaagggccgcctgcagcgcttccccggctttaacggcaacaccgtgtctgatcagaaccgcttcaagtccggccagcacaaacagcacattttcctttctgcagctgtagcccatcgttccgattctccaaattttcccctgcagcggaccgaatgagctggcgatttcaattccgaattgagacaaaagcatccttctgatcgattcgccgtctgcttccagcggaatcttcacgcatgtgacgacaggcagcttcgcctccggatcgccgaataaatcaagtcccatcgctgcaagtcccgccgtaagcgctttttcatgacgccgatgcctgcggaaccgttcttcaagtccttcttccaggacaagacgcacaccctcccgcagcgcataaagcattgctgtcgcttctgtatggtgattcagccttctttcactccaataatcctcgagctggctcagatcaaaatagttgctcgtaatcggccgatgaccggacagcatgttgccgtcagctgccgtcgcaatgccccgttctacctttttacgcgcggcaatgacagctgccgtccggtcattataagtaatcggagccattccggaggggaccgataggcatttttgcgttcccccgatgactgcgtcaatcttccattcatccgtttttacggcgcagcctccgatcgtggccacggcatccacgataaagagtgcgtcttgggcgcggcacgcttccccgatttctttcagcgggtgaatccgccccgttgatgtttctccgtgcaccatagcgacgattttcggggaaatctttttcatctcgctgataatctcttcaggccggaagaccgttccccattcacactcgatcgtatgaacgtccgctccgtaccgctcggcgatttcagtcagcaggtatccgaagcgtccgtatatcggaacgagcacgctgtcgcccggttctatcacacttgcgagaacagcctcaatccccgctcttgatgtgccgtcaatcggataggcccagcggttttccgtttgaaacaattcacggagcatttgcatcgtttcgttcatgatgccggtaaatgccgggtcaaactggccgatgatcggagcgcccatcgccctcagcactctcggttcagcttctgtcggtcccggtgtcataatggttctttgcggaatgcacaattcttttctggtcggcacgccgattccccctttacgttaataggcaagtttatgtaatacattcgccagcgtaaggacgccggtttcaagctgatgtgcgggtgtgaattcaagcggcgagtggctgattccgtcacggctcggcacaaacagcatgcaggccggaaaggttctgccgagcatctgggcgtcatgtcccgctccgcttacgattttctccgggtccgccccctgttcttttgcagcctccgctgcggttcgcgtcagtgtctgattcatttgaaccggctctatcctcatatattcatcaataacgggcctgactcctttgctgcggctgatgttttcaacaatcgataccagtttctgatggaaggctgccagcacgtcttcctccgggtggcgaatatcaacggaaaactggatacggcccggaatgacattcgccatattcggttcaaccgtcattttcccgcacgtcaggcggagctcttccggctgtctttccgctgagagcatcagttcgtggataatgctgcttcccgccgcgagcgggtctttccgccatttcattgaagtggtgccggcatggttgcattcaccgtcaagcgtaacggtatagcgtctctgtccggcaatcccggtgacaatcccgatatcccttcccgatcgttcaagcgtttgcccctgttcaatatgaatttccagaaaggcactaatatcagtgcgcagcggtgctggataacggcctgcaccgaagccgttctgccgcatggcttctttcagagaaatgccggacgcgtctttcggcgtttccgcatctgaaagcgagaaagcaccggtgatattgcctgagccccaataggtgatgggaaaacggctcccttcctcttcacagagcgacacagcctccagcgtttttttcggacgcccgcacgtctcatgcaaatgccggatcgccagcatgcccgccagcacgccgaacgcaccgtcatatttgccgccgtcaataacggtgtcaatatgcgacccggtcagaatcacctcatcaggtgattctgtgccgctcagccggccgaacacgttaccgacatcgtcaaatgccgtttccagcccgaacgcctccattttctttttgacggcaagctgggcgtccatccattctttcgtatataaaagcctcgtcactccgccggaagcggaagcgccgaattgagacagccattgtatgtcatcggaaatcccgatattcgccgacgaaagctgctgatgttccatacacgccctccttttaaactgaaaaactgacaagatgatcttcattatagaaggagcgcataacgagttcattatcatatcttccaaaaaatcaatgattttccggatactttgaccaataagccgaaggaactatttttcaaaaaagatagaatattagatttattttttggataatagaggtaaaggagggcaagtcatgacaaaaaaactttggtttctgccgattgtctgcctgtttttcatttttggatgggccgcgccgtcagcctctgcgggcgcgccggctgacacgaatctgtacagccggatggcggtttcaactgccggcggcacaactctttttccgcaaactgcctcagctgtcatcactccgtctgcggatacggacacatattacaaagaagcttccggaaaaagcggaacggccttaaagagcgccctgcaccgcatcatcagcggacatacaaagctgtcttacagccaagtatggaatgcattgaaggaaactgacgaagatccggcaaacccgaacaatgtcatcttgctctacacccaggaatcacgggccaaaagtaaaaacggcggcagcgtcggggactggaaccgtgaacacgtgtgggcaaagtcacacggaaacttcggaacagctgccggccccgggacggacattcatcatctgcgccctgcagacgtccaggtgaacagtgccagaggaaatatggattttgataacggcggctcagaatacccgaaagcgccgggcaattattacgacggtgattcctgggagccgcgcgatgaggttaaaggagacgtcgcccgcatgctgttttacatggcggtgcgttatgaaggagacgacgggtatcctgaccttgagctgaatgataaaaccggaaacggctcagctccttacatggggaaactgtccgttttgctcaaatggaatcaacaagaccccgtcgacagtaaggaaaaacggcggaacgaaatcatttacgaagactatcagcataaccgcaatccgtttatcgaccatccggaatgggcggacgaaatctggtaatcgtatcataagaagtgataagggagccccgatcatcaggctccctttttcaatatacggcgttttcagtgtcggcatcaaaaaagacggcccggttcatattgaccgcaagcagaatggcatcgccgggtttcacctgtgaagcgccgtcaagacggatcgtcatgcggtcatctccgctcaccgcatgaacgtacatctccgcgcctaagttttcacatacttccgccacagcgcggcacaccgcttcaggcgggtgctctgattgtccggcaagcgtcaaatgctccggacgcagccccgcaatcatctccttacctctgtatcctttctgcacaagaacggccgctttttctttcggaatgggcagacgaacggacgaaccggcaaaataccattgcccgtgactttcttcaatggcgccttttataaaattcatactcggagaaccgataaaacccgccacaaacagattcgccggataatgataaatctcatgggggcttgcggcctgctgaatatctccttcattcatcacgacaatccggtcgcccattgtcatcgcttccgtctgatcatgcgtcacataaacgatggtcgctttcaaacgctgatggagcttgctgatttcggcgcgcatcgtcactcgcaatttcgcgtctaagttggaaagcggctcgtccatcagaaacactttcggctcccgcacgatcgaccggccgagcgcaacccgctgccgctgtccgcctgaaagagccttcggtttccgcttgagcagatgcccgatttccaaaatatcggcggccgtccggactcgctctgcgatttcttttttcggcagctttctgagcttcaaaccgaacgccatattatcaaacaccgtcatgtggggatacagcgcgtaattctgaaaaaccatcgcgatatcgcgatccttcgggggcagatcgttcaccgcgtctccatcgatataaagcttcccctcagaaatgctctccagtccggcaatcattctgagtgtcgtagatttgccgcagccggagggcccgacaagcaccagcagctcctcatcttttacatctaagtgaaaatccttcactgccgccgattgggcgccgtatgtttttttgatatggtcaaatgttaatgatgccattcgaaacctcctccaatactggaaaccgccacatctttctgttatgttaaaaatgttcggggtttctgacagattcataaatgaaaagcaaatttgtattataacgtcataatacatataatagtactactacttgacaaaggaggtctgtcccattgttagataacgggagctcgaaacctttatatattcagctgaaacaaattatcgcggacgatatcaagaagggcgtttattcgccgtccgtaaaactgccgaccgaaaatgagctgtgcgaaacgtacaacgtcagccgcataacggtcaggaaggccatccttgatcttgtggaagaaggctggctcgtccggcagcagggaaaaggaacgttcgttaaaagccctaaactgaagcgggagctcatcgcggtcaacggctactctgaatttatggaatcaacggggaaaaaaccgaaacaccagatcctttcctatgaaatcattgaagcgcctaaatccatcgcccaaaaacttcgcgtcgcttccgaaagtcccgttcttgaattgaaacgcattttatttcacgacgaccagccgctctcattcgaaatcgcccactatccgctcagtttatttcccgacatcggcaagcatattaaaggcggcgtgtcgatgcatgacattttgaaacagcactatcaggtggtgcccacccataatacgaagctgttaaatgtcgtatacgccaagcaggaagaaagccgctatctggcttgtgatatcggggatgcgctttttgaaattgacaaaaccgcttttatgtcaaaagaccagccgatatacagctcgctgtttgtaatgcataccgaccgcgtcacgtttaccattaacagtccctatgtgtaacaagtataaaaaacgagacaatgcttatcgtattctcgttttttcactgcttttcccgccgcccggcctgtagggatgcccgtaaccgaacgctccgaaccctccgcatgttttggcagccgtcccggcggccgcagtaagcgctcgccgaatatcctgattttcgaagaaatcggtaagaaacccggcgataaaagaatcacccgcgcccaatgtatctattatatcagctcttaccaccggctgatgatagacgcgttccccatccgataacaccgcgccatattccccccttgtcagacagacgattttcgctccgaaaccgcgggctttttcggcaagccgcatacattcactttcactcaaatcactcccggaaaaaaacgcatacgtcacgtacggacagaccgcttctaaataggcttcgtcacgttttacagagaagtcaaaggaaatcggcacatggccgctcagcatcgggaggtcacgttctatcctgctgtatacgctcgtatgcagcagatcatgtccggcgataaatgagatgtcattctcctgaaaagcgagcgtcagacgcgattgcacgccgcctttatttgatccggcaaatatcctgtcccctctttcatcaagcgtgacgaccgccatcccgttttcgccgtatgcccggcggatcagatcggcattcaccttttccagtttcagcacattcaatacgtgatccgccgcttcatcactgccgagaatcccgatataagaagtttcgtggcctaagcgccgggcaagcacggctacgtttaacgcatttccgcccgggtaaaacgtctcctgatcctgataataatctactacattatctccggccgctatcagtttcatcttttcatcctccttatcctttcacgcttcccgcagcaatgccgcggataaaatatctctgcatcaataaaaacagcgcgatgatcggagcagcagaaatcgtcagcccggccagcagcacgccccaatccgtctgcagcgcatctctgaactgcatcagcccggccggaatcgtccgtaaattttcatcatcgataaaaataatcgcaaacataaactcattccatgtatggtaagccgtcaaaatgcctgatgtcaccagaatcggcacgctcatgggtaagaatattctgaaaaatattccgaaacttgtacatccatccagataggcagcttcctcaagctctttggaaatcgacaaaaaataggaacggatcagaatcacggtaaacggaatacggtaggcggcgtacggaagaatcaatgcccaatacgtattgtacagtcccaatgactggataatggagtacagcggcacaagactgacctgcggcgtcagcatcaagccgccaagacaaatgatcagcacaaacccttttcctttaaattgaaaacgggccagcccgtatgccgcccaggcgctcacaaatacggtgatgagacaagtcagcacggtcacaatgacgctgttcataaaataagcggaaatcccttggttccatgcggatacgaagttttcgggatgccagacagagggcagcgaccagctgtgctcaaaaatctcatccgagcttttaaaggcgctgaccgccatccataacagcggatatgcaacggcaatgaggtagataaagagaaacagccacacagacgtttccccgacataccattttctcggttttccgcctgttctgacggcctgacgggcatgacgcaagtccgtcttttcagaaagcatcggctactcctcctttccggtcttaaagaatttcatctgaataagcgacagagcaagcgtcagcaaaagcaccaccgtcgcgatcgcagaagcgtagcccatcatatcttttgtaaaagcgctcttatacaaaaatgtgctcagcacttctgaagcattgcccggccctccgccggtcagaatatacggttcattaaatacggtaaatgcgccggtcagcgtcatcaccacggcaacaaacgacatttctttcgtctgcggcaccgtaatgtgaaaaaactgctggatttttccggctccgtccagctgcgccgattcatataattcagcgggaatgctctgaatcgagacaatgtacagcatggcgatgtaaccgacagactgccattgagacacaaaaatgacagacagcatagcggtgttttcatcgcccagccacgcgcgggtcagttcatcaagtccgacggcttccagcagctgattcaaaagcccgatttccgggttataaataaaatcaaacaacagcgcaatgacggtcatggaaatgacgaccggaagaaaaaagaccgtgcggaaaaacggcgaccattttcttaccagtctgtcttccagcacggccgccagaattaagccgccgccaacctggcaaatcagcgatatgaccgcatacagcacattgttgcggagcgctgtaaaaaacacgggatcgtgaaacaggtcaatataatttttcaaaccgataaacgtcttttcgggttgaaatgagctccattcaaacagactgaaaaacacattctcaataatcggaatgtaaacgaacagcagaaaaatcagcgcgggcgcgagaaacagatacggaatgaaacgttttcggctgaccaaggaaatcctcatcacctttctccaaagaaatctgttctattcagatgacgctttgacttgacgcgccgctttctgcacggaattcatcacctcgcgcggtgtcattgtgccgccgagcatctgctgaacgcctgccgcatacacatcggcgatttcaacgtcaacatccatatcaaaccacggcaccattgtttcggcgcggacgatatcctgcacggcttcacgctggatcggggcggaattgttttctgtcgccgttccttgaaccgcgctgtatttaccgacgtcttttatcagcttctctcccatttttttcgaggttaaaaactgaagaaattccatggcttctttcgggtgcttcgtttttgaggaaatcataaatccttccggagatccggtcagtgcacggggagatcccttttcgccgctgattttcgggaaaggaaacaagcccagattgaccggttcgacgagcttaatttctgccgtttccgcataaatcatcgccgctttgccgctcgtaaactgctggcgcacgtattcgtgatcgacggagttcacgtgctttgtaaagtacggcagaagttcctgaagcttttcaagcgctttgacatagccttcgtccgtaaactccccggtttccgggctgtaatccttcgcccgcgttttttcatccaccatacgctggttcagcgtcccgatataatgagaaatggtccaaggcgcttttgtgccgaaactgatcggaatatatccgttctctttcaatttctcagagactgtgatcagttcatcccatgtcgccgggggcttcaaatgtaatgtattaaaaatgtccttattataaaagaatgatttagcgtccatttgccacggaacaccgtactgttttccgtcatgcgtaaagggtttgatttgtgactgcacaagctgagaggaccaatctttatcctgctgatagtaagacgacagatcgagggctttatctcctttgatgaatttataagcaaaccggtcgctccatgaaaagaaaatatcaggggggctcgttgttccgagcatgactttcaccttgtctttataagaatcgtttaagaccgcttccgtttggatatgaatatccggatgagcggcttcaaattctttgaccgcttcttcaaaatagcttttttcaggctccttcggccacctgtgaaaaaacttcaaggtcacttttccgtcagaggaactgctttggcttgaacaggcggcggctgacagacatacggctaacagaacgaacaggcagatgagctttttcagatgcttttcctcctttgtcaccggactataacgttatatatcattatagtccagtgaaatataatgcgcgttcttaatattcgactttccacatgtaacgccgctggcttaacggatggttccttgcttccgccagcgcatccgcatagcttctgagcacccggtttaatacgagaggagccagatagccttttacagaatcgtcaattccggaaaaatcatatgctgccgcatcaagcacagtcagttttttgccgtatctttttgagaaggaaagcgcccgctcttcaaggggtcttgtttcgtctaagccgagcaggataataaatggaacggattcatcaatgatttcgaacggtccgtgaaaatattctccggcatgaatggcgtgggaatgaatccattgcatttccatgagaatgcagatgctgtaggagtaagcgacgccgtagttcgcaccgcttgccatcgtgtaaatgatatcttctttttcgtgggctttcgcgaatgcctttgcgtgatccgcttcttgtttaagcgctttgtcatatacggtctggagcttattgagtccgtcgatcgccggctcaaacgcgggatggttttccagcacgtgtaaagcgccgaacacgatttgatacagaaccccgtaattcgtatttatcgcctgtgcgttctcaccccagtcatacaccgcgacatattcggcttctttcgctagcggcgaatcaggctcaaaggtcatcgcaatcgtaagcgcgcctttttttctggcgaaaccggcggctttcaccgtttccggcgtattgcctgactgagaacataaaatcacgagagagttctctccgagctgaacgggattgcgctgaataaattcatttgaactgtagagatcagagctgatggctttcgcctctctgtcaaacacgtacttgctcggatacataatggctgaagaacccccgcaagcgacgaaaaagacgtggtcaatcgtttttcctttcagatcatccaagaaagcctgaaccttgtgattcacttgtgcggcagtttgactcaaatccttcactcctcagtgttttattatataacgttatataacattatataacgttatattaatcgcaacaaaggtgcgttgtcaatcatattttctgaaatttctaaaatataaaataaacccggcttatttcccgccctctcttgacctgacccttagagacacgtttagaatgaaaaacagggagtgattcagaatgaatataaaagaagccgccaggcagacgggtctcacgaaaaaagccatcaaatattatgagcaggaaggtttaatcaccgtcagcaaaaaccctgataacggataccgtgagtattccgctcagaacgtgaatacgctgaaaatgattgccgccctccgaatgctggcactgtctgtaagcgatattaaagcgttcctcttagagggcagcagtctgcatgatatactgcgccggcagcatcaaaagctcagccggcagattgaagagcttgagcaggaacggaaactgactgaaatgctgatcaagcgcgtggaagatgcggaaaatgtcgattcaattctgcatgatatcggcgaggtcaaaatagatgaaccgaagtatatgggacttcagctgaaaaaactgttcccgggagatttcggagaatttatcgccgcgctgtttgaaccgttcctcgacttttctattgatacagatgagaaaaaaacgatatgggcggagcttattaaagtattggatgatatggaagaagttccggctgcacacccgatgatgcagctggtcggcaaggaggatccggctcagctccagcagcacaaagtccagcatgatcaatttatcgagcggattttagagagagaccccgccacttgggacactcataaaaacatcatcattcagcttgtgaaaagagtgcagacagatgaagaatacagggaaagcctgatcaaggtcggagaatcagcttctgatctgcccgcgctgaaggagggatcgcctttcagcaatcttcttcaaaagctcagcccgaaatatgacacgtacgtgcgacttcagcttgaactgaaaaaagaagccgacgaggaactcggctttgattcagaagcatatttaaaacagatgcttcaatcaaaaaaacgctaaggttcgtctccttagcgttttctttcttcagcctcagtgctgcgcgttaatgcggtcaacgacattagcgatgagctgctcttttcctaagtcggaatcttcgtcaacgcttgctactgtcaaaatgatggccgctaccgcaagagcgatcgtctcaatggcggccgccgcgtttaaaaatacccatacagccgttgcgcattggccgatggccgttgattttcctttgtccatgctctttttgtcaaactcttctttcagcactttcgccataatctgcgaaccttgatcaatgacgctgttcactttctcataatcgccgctgtagaccgccgctttcaactctttaaaataattcggcgatgactttttaatatcagcgatcacctgatcggaaacttgcttcaattcatcctgatcaatctttttgacagccttggtatcccatacttcaggaaggagctttgcgacctcaccttgtccgaaaaagatgccggaaaaaatgtcttcacccgaataagagacggatggctcagttttcgccgcggcatgcgggccgactaatgcgaccattaaaacaaacaccagcatcatggcagctgcggacttcttgctcttaaccatataatttcctccttttccttttattgaaaaaattgtatctgataaaaaggggattgtaatggttcaaagctactgttttctctgccggcaccaaaaacaggaccaaaataccagccaccgtaatggaaaacgaggtaagccccagcataacggcaaagatttcgtgcataaaaatggagataaacaatatcagacgccaatatgttttcggagcaaacaaagcgcagaacataatggtttgcacaatgagcgtgccccacgtcgggatgatgacaagcttggactgcaggataaagtcaaacagaccgtgaagcgcatccggcagacccagcatcggatcgttcaaatagtaataaacggcagttccgttctgccactcttcttccatcagtttagcaatgacggagttaaaatacagcattgcgacctgtattctgatgattgtcagcgtcgcccagcacaaggagcggtaataaggctcaagcggccttttctcaaaagacgcctcgtacggagaccagtgccatttccgcggatcggttaatgtcagcgggagcagcagcagtgtaaaaacggcagccacctgatctcctccgtcaagggtaacggcggagttttggaagctgtacgaaatccaccagtgaaaaaaaccggtgattcgcggccgccagccaatgacgacaaggattaacatacagatacaaacggctttgacgatctcaatgtaacggaaatcgggaaacagcagaaacaggctgaacgtgtcggaaaaactgagcatttgattttgcgttttgaagaagacagacgccggattgaacagcaatgtcagcagcgtgccgagcgcgattaagcttctggcaagcccgtacacatttgtccaaggcggattcttcatcatccataaggtgagctgcttttttgcatcctgaatcaattgacatccactccgatgtattttttgatggttcttttcgtttcggtatgttggctccatgcccatggggtaatgcgttcatatgtaatgatcattttccctttcagccttggggagggagactcatttttcattttcaaaaatgtggtatccttaatgtcttggccagtcgtgaagtcgttccacttctctttggaaggcagcttttccagcataaggccgagctctatcccttgcgtccggccgtagcggtttaagccgatgacatttttcagagaattattcggccatctgagctcctcatcggcatcaagaagatagatgttcaagctgtcttctctcggatctttactgaaaaatccccagctttgcggataaatcatggaaacggttttggattgatgcttggttaattggatggcggagcttggcaatgccgcgatgatggtaaaaaacaaaacgatgatccaggcggccatgataaaaagaaagaatgaaaacatgctggtttgcttcttgtcagtcaattgaaaccctcctagcgtatggaaatttcattgacatgattatacaccattcaacaagtaaaatattgataaattagatttttcagactaatatactattatatgtaaaaaagggagtgttcatatgtttttgatgaatgataaagtgctgtggggagctgtggttctcgcctttattctatcgattgtgttttatccgtttcttcctgctgatatggccattcactatgacgtgtcgaaccgtccgaatacatcaatcaataaaacggccggcgtcctgatttttcccgtgctcatgatgatctgcatgttattcagaaaaaaggtcgtccagctattcctcatcgtttactgtctgctgatcgtgcatattgcagtgatgtggctggcactgtaaacataaagaaaaccggagcccttaagctccggtttttcttatttataaaatactttctcaatgttgtatttcgactgaagggtattgatcgcgtacgtttcgtaaatctccctttccatcggatcatttacgacacatacttcaattttatacacttcgtctctgtgatgtttaacaggcgacacattgtcttcaaaatgctttttgattctttgtcttaatttacgggctttcccgacaaacagcagctcatcatgaatgttataaaacataaagatgccgcctttgtctctcggaatttggtgaaaatcaatgaaaccgtaaatcgctttaatcgccggttcattctccgacggtgactgctgccgttccgtaatggttacatcaggagcaggaaggtttatttttatcaaatgggtcacgtcctcttattcattaaagctccatcctatcataagaatgcgccaaaagctattttttattcaagcgccccggccggatcataaaggcttaaatcaatttccgtctgctgcccgagcgcgagtttcgccagttcagcccccagatacggcccgctcgtcagtcctgaggcgcccagcccgttggcaacgaggagtccgctgatattcggcactttgccgatgacgggaagaaaaccgggagtaaacggcctgaaaccgactcttgtctctattacagtactgtctgaaagccccggcgccacggttaatgctttgtcaaaaatctcgcggagaccgccggccgtcacccgcaaatccatgccggtatcgttttcatgagtcgcgcccgctatgattctgccgctgtcaaaggcgagaatatattgatcgtttgggggcatgacgacgggccagccgcccgtctcctctccctgaagctctaaatgaacgatctgcgccttttggtatgatactgaaaaacggatgccgagcggctcaagcagctctctcgcccaagcgccggccgttacgagaacctggtcggcagtaagcgtgcgttctgcggttttcacaccaatgacggcaccgtcctctgtcaatattgacgcttcttcattgtaaaccgccgcgccgtgcttaacggccgcgtttaacagcgccttacgaagcgccctcccgttcacccgggccgcgccgctgacataaaccgctccgtattcctccgacagcgcggggaacagcgccttcgtttctgccggagtcagtcttgtaatgtcaccgatttcagaggcgtcctctcttcttttataagctctttcctccatttggctgagctttttttcatccgtatggaggctgacggcaccgaccttttgataaccggtttctgtttctccgtcagcttcaagctgctgtatcaatcgttcataataacgggctccgccttttgcgatcgcataccatgcctgattgcggcgctgtgacagccacgggcagacgatccccgccgcggcgtcagtcgcctgccccaggtgcttccggtcaatgaccgttacatccgccccggcctttgcgagatgataagccgcggacgcaccgagaatgccggccccgataatcaaataagacttcatgtataacaccttttctatctgttttgtcttatttattttaacaaatggagcgcccggttcctaccggagtcctgacggcaatgatgagtttcgaaaacggaaacgtataataaaaggaatacgttcttgtctgaaagccgttttcctcaagaattgctctgtattgtgatgtattttttatatctgacacggccaatgtgccgccaggcttcagcaccctcaccatttccgcaatcgcccgttccctcttttttctgcctgaaatgttgtgtacggtaaaatgcgaaatgacaaggtcaaacgtctcatcaggaaacggcatgtcttgcgccagtccatcatacagatcaatttccggcgctctttcagcctgtctgttcttttcaaatgcgtctcttccgtttccgaccagatcccagctcgaccatttgtcaatcgctgagacgtcagcgcctttttgagccgcggcgatggctaatagcccccgccccgtaccgacatcaagcaccttcatgtccggctttaaaccggaaagcgaaagaatgcgatggcggtgtaaaagtttaatggccgttgaatacaagagcatccaaagaccgagcaataaaaacaaggtgcccgtcagccagccccagtaaggaggaatcatgccgcataacgtggctgcggcataaaggagcgcaataaagataaatccaaacgctccataaggcgcatcaattccgtatcgtgttgtcataacacccacccctttcaatatttatccaaatggtataccatattattctagcaaaagccgaaaggagatacgaccatatgaaacgcggcattacatttaacatcccaaatcaattcggacggtttgcggcagatatatgacaacagttccccatctcttcctatacgtggtttatcggtgatggagaggcgtatactgaattcaaagaagacaccgatacagacctgtttccgcaaaatcagcgcatcattcagggtcaagaactccgtcagcgtctggaaggaaacccttattatatgatttttgctgaattgaaagctttcccgggcgggatggtaacggaaatcaatacgtacgaggagtatttggagagttcctgtgagcttgtgcttctcattgcagattgctcgtatgtaacgttatattgcaaagatccggatatgctcgaagccctttatcagcaggctgtacaatgcggatttctccgcgttgactatgttacagatgagaatgatgcgagaacgggattgtctgtctgatgaaggtgcgttctttttatgaagcgcctgatagggcttaggattcaaaatattgacaaattcgtgtgttttcaacaaaaaaacaaccccctcatgtatactgagtgcgtaacttacatatgaaaggggtatggcaatgaaaatcagcttgaagaaaaaagcagatttttggaagaagacggcggtttcgtcacttattttcaccatgttttttaccctgatgatgagcggtacggttttagcggccgggctgaataaggatcagaagcgccgggcggaacagctgaccagcatctttgaaaacggaaagacggaaatccaatacggatatgttgaagcgttggatgacggaagaggttacacttgcgggcgggccggctttacgacggctaccggagatgcgctggaagtagtcgaagtatacacgaaagcggtgccgaataacaaattgaaaaagtatttgcctgaattgcggcgtcttgcgaaggacgaaagcgatgacatcagcaatctgaaaggattcgcttctgcctggcgctcacttggcaatgataaagccttccgcgctgcccaggataaggtaaatgacagcttgtattatcagccggcgatgaaacgttcagaaaatgccggactgaaaacggccttggcaaaagcagtgatgtacgatacggtgattcagcatggcgacggcgatgatccggactccttttatgccctgattaaacgcacgaacaaaaaaatgggcgggtcaccgaaagacggaactgacgagaagaaatggctcaataaattcttggatgtgcgctatgacgatctgatgaatccgtcagatgaggacactcaggacgaatggagagaatcggttgcccgtgtcgacgttttccgcgatattgtcaaagagaagaactacaatttaaacgggccgattcatgtccggtcaagcgaatacggtaatttcactattcaataaacaaaaaaaccccgccatatggcggggttttactattaaccgatggagccttccatttcgaatttaatcaaacggttcatttcaactgcgtattccatcgggagttcttttgtgaacggctcgatgaagcccataacgatcatttctgttgcttcttcttcagaaataccgcggctcatcaagtagaaaagctgttcttcagaaacttttgatactttcgcttcgtgctccaatgaaatgttgtcgttcaggatttcattgtaagggattgtatcagaagttgatttgttatccataatgagcgtatcacactcgatgtttgaacgggcgccgtccgctttccgtccgaagtggacgataccgcggtatgttacttttccgccctgtttcgaaatcgattttgatacgattgtggatgacgtattcggtgcaaggtgaatcattttcgcgcctgcgtcctgatgctgtcctttacccgcaagagcgatagaaagcgtcattccgcgcgcgccttcacctttcagaatgacagccggatatttcatcgtcaatttagaaccgatgtttccgtcaacccattccatcgtcgcgttttcttcacaaaccgtacgtttcgttactaggttgtaaacgttgttcgcccagttttgaattgttgtataacggcagtagccgccttttttgacgatgatttcaacaaccgcactgtgaagcgagtttgttgtgtacacaggagccgtacagccctctacgtaatgaacgcttgcttcttcgtcaacgatgatcagcgtacgttcgaactgacccatgttttcagagttgatgcggaagtaagcttgaagcggtgtttcaaccttcacgcctttaggcacgtagatgaaagatccgccggaccaaacagctgagttcagcgccgcaaacttgttatcagtcggcggaatgactttcgcccagtgctcgcggaaaatgtcttcattttctttcagcgcgctgtctgtgtctttgaagacgatgccttgctcttcaagatcttctttcatattgtggtaaacaacttcggattcgtactgtgcagaaacaccggcaaggtatttttgctcagcttcaggaataccgagtttgtcgaatgtctgtttaatttcctcaggcacttcatcccaagaacgctctgaacgctcagacggctttacgtaatacgtaatttcgtcaaagtttaaagagtttaaatccccgccccactgcggcatcggcatgttgtagaaatgctcaagagatttcaggcggaaatcaagcatccattgaggctcttctttcatgcgtgaaatttcttctacgatttcttttgtcaatccgcgctctgaacggaaaatggaaacgtccttatcgtgaaaaccgtacttgtattcaccaatttcaggcatttttttagccatccattttcactccaatcttttaattgccgcctttttcgccagcgactcctttttcaagtgctttccatgaaagggtggcacatttaatccgggccgggaatttcgaaacgccttgaagagcttcaatatccccgagatctatcgagtcgtcatactctttcccttgcatcatgtctgagaaaatcttagacatagaaagggcggtatcaatatcttttcctttaatcgcctgcgtcatcatggaagctgaagccatggagatagaacagccttccccttcaaacttcgcttcctgaacggtatcgccgtcaagcttcattgtcagtctgatccggtcgccgcaagtcgggttgttcatatcgacgacgatgctgtcatccaaaacccctttgttgcgcggatttttgtaatgatccatgatcacttgtctgtataatgtatctaaatttgcattaaaagacatttgtaaagtactcctttgtcttttggagggcttccgcgagcttatcgatctcttcctctgtattatacagataaaaactcgctctcgcagtggcagatacatccagccatttcatgagcggctgggcgcaatgatgtccggctctgaccgcaatgccctcagcatcgaggacagtcgcgacatcatgagggtgaacctcatcaagattaaatgtcacaagtcccgcccgctctttcggaccgtataccgtcacgccgtctagctgctcgaaacggtcaagcgcataggctgcaagcttatgctcatgccgggaaatctcgtcgagtccgatctcttcaaggaaatcaatcgcggctcccaatccgatcgcgcctgcgataatcggcgtgcctgcttcaaatttccacggaagctctttccaagttgattcataaagccctacaaagtcgatcatctcgccgccaaattcggccggctccatattctcaagcagttctttcttgccgtacagcacgccgattcccgtcgggccgcacattttatgggaagaaagcgcgaagaagtcgcaatccaagtcctgaacgtcgattttcatgtgcggtgtgctttgcgccccgtctaccacgatgaccgcgccattgtcatgagcgattttggcgatctctttaatcgggttgatcgtgccgagcacgtttgacacatgagcgactgccacgatcttcgtatggcttgtgacagtctgccggacgtcgtctaacgaaagcgtgccgtcttcctgcattgggatatattttaaagtcgcgccggttgcttttactgcctgctgccacggaatgatattcgcatgatgctccatttgggtgatgaccacttcatcaccgggttttaagctggcgcgggcatagctcagcgccaccatattcagtgaagttgtcgtgccttttgtgaaaatgacctcagccattgacttcgcattgataaacttacggactttttcacgcgcaccttcatagccgtctgtcgctctcgtgccaagagtatgaacgcctctgtggacattggaattgtatttgctgtaatactgatccactgcttcaatgacagcacgcggcttctgggaagtcgccgcgctgtcaaggtacacgaggtcatgtccgttcacttgctgatgaaggatcgggaactgttcacgaatatcggtgatattcattattttactttcctttcgatgacggagacgagctgtttcttaactccttcaatcggaagctcttttaccaccggagcaaggaatccgtagatgactaagcgctccgcttcttctttcggaattccgcggctcattaagtagtaaagctggatcgggtccacacggccgacagatgccgcatgtcctgcagttacatcgtcttcatcaattaaaagaatcgggtttgcatctccgcgtgctttttcactcagcatcagaacgcgggattcctgttcagcgtttgctttagacgcgccgtgctcgattttgccgattccgttaaagatggaagatgcggcatctttcatgactccgtgcttcaggatatagccttcagaagccttaccgaagtggatgatctgcgtcgtaaagttttccgtctgttctcctcttccgacaactacggttttcgtatcgccgtatgtgccgtctccgtagaggtttgtcgtgttttcagaaatcgtgtcgccgtcgttcatcagtccgagcgcccactcgattctgctgtcgcgtccgcgcgcggctccgcggcggttgacgtatgtcgtgacgcctgctgacaggttgtcaacggcgccgtacgtcacgctggcattatcacctgtgaccacttcactgataatgttgaatacagcttctttcggattcaccgtgctgatgtagttctcaacgtaagtgacggagctgtggtcttcagcgacgatcagcacgtggttgaacaatgccgtgtcattgctttcatgaacgtaaacggcctgaacaggcgtctccacctgaacgtttttaggaacataaaggaatgccccgccgttcattaatgctgcatgaagcgcagtcagtttatgttcgtcgaccttaacgccgtctttcatgaaatacttctcaacgaggtcgctgtgctcacgagcagccgttaagatgtccgtaaagatgacgcctttgtctttcaattctttagaaagagaaaggaaagcgggcgtttggtcacgctgcacgtataacgttttgtcttcgttttcgatatcgatcagcgcttttgcttcatcagctaaatcttctaaagaagcaagcggcgcattttctactgtatgcttgttgaactttgtaaagttccaatttgtgatttttgttttatcaggcttaggcagcggcagatcgtcagctttttcaagagcctgtaagcgcaggtttttcagccaggcaggttcttgatgcttttcggaaaagcctttgacatattcctgatctacggatagtttcgtttccaatgtcatgattatccccctaacgcttacgcttcttggcctacagtttcgtcttcaatgcctagttcttgtttaatccagtcataaccttccgcttcaaggcgctgtgcaagctccgcgccgccggatttcactacgcgtccctgcatcataacgtgaacgacatcaggcgtaatgtagttcagaaggcgctggtagtgagtgatcattaagcagccgaagttttcgctgcgcattctgttgattcctttagaaacgactttaagtgcatcgatatcaagacctgaatcaatctcgtcaagaatggcgattttcggctcgatcatcataagctgaagaatttcgttgcgttttttctccccgcctgagaaaccttcgttcaggtaacgctgcgccatttcagggtccatttcaaggaactccatgttttcgtccattttgcggatgaatttcataagagaaatttcatcgccttcttcacggcgtgcgttaatcgcagagcgaaggaaatcggcatttgtcacaccgctgatttcgcttgggtactgcatcgcaaggaaaagacccgcctgagcgcgctcgtccacttccatttccagtacatccttgccgtcaagcgtgatgctgccttttgtaacttcgtatttcgggtgtcccataatcgctgctgaaagcgtggatttaccggtaccgttcggccccatgacagcgtggaattcgccgccttttatttcaaggtttacaccttttaagatctcttttccttcgatttcaacgtgaagatccttgatcgttaatgttgaagcagccatatctatacctccaaaatatataatcattattctcaatttattctcattctaattttataacaaatgaaaagtaaatacaactttttatattacccggaacattcctaaagtttatcaaagatcaaggcgtaattaaagctgtttgaaacagaaaaagggcggaaatccacccttttttactgaccgattttctcattaagctgcgctgcgaggaacttgcttttttgatattcaagctccctctgccgttcgacttccatcctttttgaaagacgccgtccgtattcctcgtagccgatgccgtgtgacttctgcatcgctttttccatttcaggcgtatagtcaaggtccagtctctcgtggctggtgcagataatgaatcaatcccttcatctatttgtttctattgtaacaatgatccgctgctccggccaaagagagtgtgcccctgaatcctttcgaatgtgccggaatccggcgctcgctttatctgaaaaacggtattcacacgattgctctttctaatgcgtcgtatgtccgaattcctgaatacactgctgcacgagggtcactccctgactgagagccgcaccgcccccgaatgccgccgcgacgccgatgacctcaagaatgttttcttctgtcgccccttggtcaaggcagcccttcgtatgataaatcatgcaaaattcatcttgagcgctgatgctgatgcccagagcgattaattgtttctctttttcagttaatgaatccgctgagaaacactgttcagtaaattcattaaacttccgccccatcatcggcattttttgctcgaatatgcctaaaccttctttatattgtttcaatgcgtcatgcacgctttttccattatcctggtattgagccactgccattccctccaataagttaaccttcctttttattatggacagttctctgattaatacccgaaaaaaaccccggatgattcatccggggtttttgctttattcagatacgggaagcacggctccgtcgtattttttctcaataaagtctttgattttcttagagtgaagcacttccataagcgctttgattttctctgatttttcgtcacctttgcgtacggcgatgatgtttgcgtacgggttgtttttcgttgattccacttgaatcgcatcttttaacggattcagtttgttttgaatcgcatagttgacgttaatgaagactgcatcgccttcttcttcattatatgctttcgccgttaattcaggggcgatttttttgaatgtcaggtttttcgggtttttcgtaatgtttttcgtagtggcttcaatcgtttttaccttcggatcaagtgtgatcagtccggctttttcaagcatcgccagcatacggccttgttcagcgacattgttagtcatgatgatggtcgcgcctttaggcaggtctttcagtgatttgtattttttcgtgtaaattccgaatggctcaaggtgaacggctccggcattcacgagtttgtaatctttattttctttcatttcctgttcaaggtaaggaacgtgctggaagtagttcgcatccacttcattatcagctaacgctttgttgtacattttgtaatcgttcagcacttttacttttaatgtgtagcctttttccttcaagagcggttccgcttcttttaagatttcagcatgcggtgtttttgtcgcggcgacgacgatttcctttttatttgagccgtttgatccgcaggcggccaaaactcccgcgaacacaagcagcagcgcacttaatacaatctttttcaatgtaaatcctcccttatcttttgtctattatatttgtaatcacatcaccgataatctgaatgataaagacgatgatgagtataaatactgtcgctacaaacgttacatccgtattattggactggtagccttctacatatgcaaggtttccgagtccgcctgaaccgatggcgccggcaatggcggtagatccgatcagggcgatggctgtaacggtgatgcctgaaattaaagcaggcattgattcaggaatcagcactttgaagataatcgtcgatgtctttgctcccattgatctggcagcttcgatgactcctttatcgacttcccggagcgcaatttccgcaagacgggcgtaaaacggcgcggagccgataatcagcgccggcaatgcggcgttcggtcctaaaatcgatccgaccaaaatcttagtaaagccgagaagcagaataattaaaataagaaacggaatagacctgaaaatattaacgaccgccgcaatcacggtgttaatgattttattttcccataagcttcccttgcccgttaaaaagagcagaagaccgagaatcgctccgatgacaaatgaaaaaactaatgcgatgaccgtcatataaagggtctcgtatgtggccgtccacagctcggttatatcaacgttcgggaaccatttttcaaacatttgtgatcacctctgcttctacctgtttgtctttgatgaaccggatcacgttttctacttctttttcctgaccgtcaatatgaatgaataaagaaccgtaggctccgtccttcgtctgtgaaattttcccctgcagaatattgacgtccacatcaaagtttcggatcatttccgtaatgaggggctgctcagcggcctgcccgacaaatgaaagctgaatcgtttttcctgtcgctgtttcctgcagaaaatgctggatggtttctttcgtctcctccggttctgtcacctgctgaacgaaacgcttggtcatcggttcgcgcgggtttctgaaaacttggagtacttcgccttcttcaacgactttcccgttttccatgacggcgactctgttgcagattttacggatgacgtgcatttcatgggtaatgagcacgatcgtcagaccgagtctgtcatttatatcggataaaagatccaaaattgaatcggtcgtctgcggatcaagcgctgatgtcgcttcatcgcacagaaggactttcggattattggcgagcgcccgggcgatgccgacacgctgcttttgaccgccgctcagctgcgacggataagatttttctttcccctctaatccgaccagtttaatcaattcatcagcgcggcggacccgttcgctttttttcacgcctgcgatttccagcgggaacataatgttctcccgaacggtgcgcgaccacagaaggttaaaatgctggaagatcatgctgatttcctggcgcgcttttctcagcccgcggctgcttactttatttaattccgtccccgcgacttccacggttcccgacgtcggcttttcaaggccgttcaggagacggattaaggaacttttaccagctccgctatatcctataattccaaatatttcgccctttttgatatcaagagtgacatcttggacagcattgacatccccatgcttcgctttgtaaatttttgaaacattttgaagatggatcaaagcaatcacccgccttacactattctaagaaatcttccgggtttctccgcaaaagaaaagcctttctgcaaaaatgagcagaaaggcttattgaaaaaggcctttctctcatctttcaaagcagaccgcttcgagtgaattggcaccatttcaacattgttgatggttgccgggcttcatagggcacttccctccacctctcttgataagagaaaacatatcgtattttcgtccggaaattcttactgtagaatagcacggcgaatgataaaaagtcaataaaataaatattggaagctattgtcacatagtagattggcagttacggccgtttactgatcgcctgaaaaaatccgtttgtcagccagaggatggcctccagcttcagcagagctctgaatgatcctttcactttgagttttccgctttggataagcttttgcaaagagacatcaccatgcaggagatggatgatttccgtctggtttccgtaaaaggtcaaattagatttttcctttgaaaccgacgtttttctcatttctccctgtccgttaattgagaccgttaaggcttctgtttctccttggaatgtaatcagcagcgttgaggcgtttaatagcggtttcaaaaacagatgctgtccgtcattctctgaaacttctattttctccactcgtataacctcccgttttaatggccatacatacactttctctttttaacggacagaaccctttataaaccgcacgacattttcctgtaaatattgtcacatcgggaacgtttgcgatgttttttgtttaatcagctcatataaataggaaacggagcggaaggcgtatcctttctcaacaagctctccgcctttaaacagcaaaaagcacggaacgctttcaatctgataggctttggcgaatgcgggggaataattcacgttgtttttatagaaggcggcgccgggcagcatttcttcgacgacagtaagcattttggacgccagctggcatgtgccgcaaaacggggtgtacaaatacaggagataaacgtcatcctgaatcgattcgagttcattttcttggagttctttcatgtttaccacctcaggtcgttctttttcaaaaatacagtgtcagcatcaaagccggctctgatcagcacagatgcgagatgatggcccgggcacgactcgacttgcctgtatgttctgtctatataaatatggcgcgcttcgggaagctcccgtttcagctgttttcttaatttttctccggagtcatctgcgtccgttaaaatatagacgtctctgtcaaacaggcggtccgccaaatcttccagttcggtttggccgatcgtcccgtttgtacagatgatttccgcgggttcgatgagcacttccctgactttgattttatcagattttccttctacgataatgaccttttcatctccgttgtacataagcgcgtcacctgccgattgttttagcgtcagattgaaaaagaaggcagtgaaattcaccgccaactgttaacaccagccattctcataatcgcaatcgacatatttcggatcgctgccgtttatgacatcggctgttttataaaatttttgattttcaaatgaaaagccctgtttgagctcgtactggtccatgcctgtcatctcgccgatggcttcattttcatgaaataaggaaaaccggccgttttgaaagcggcccgtaacgttctccgtcacatcgaccttttgtttatcaaaagccattttagacacctcccgttacagatagaatgtccaaatggcccctttgctatccgatcagtcttcctgtgtcatttcgtcatattgctcggaagtcatgaggttttcgatttcttcagcatcagccggttccacgacgatcatccacgctttttcatacggagactcgtttacgaattcaggactgtcatcaaggtcttcgttcacttccgtcaccgttccgttaatcggtgcgtacagttcggaaacggttttgacggattccacgctgccgaatggctcgtccgctttaatttcggcgccgacttccggaagctcgacaaagacgatgtcgccaagttcggcttgcgcgaaatgtgtaatcccgatgcgggcttttccgtcctcaactttgacccattcgtgctctttggaataacgcatatctttcggtgtgctcatctaaatccctccatttttttcttataataagaagataccataattctttgaacctggcattacatccaatatttttcgaattggtcttctttaaagccgacagtgactttttcgccgtctgtcgtaatcgggcgtttcaggagcataccgtctgatgccaggagttcgagctgttcatcctctgacatatggtacagtttttcctttaagttcagctcgcggtatttcattccgctcgtgttgaaaaactttttgagctcaagaccgctcttttcatagaggtctttaatttcttctttcgacggagtttcctccgcgatatgtatttcgtttatttccttaccgcggtcttccagccattttttcgcattacggcacgttccgcatttagggtaccagtaaaaatttaacgacatcttcttcaccccttgtaaatgatcgtcgttattttaacacaatcacttgtaaaaacctataacgttgcttcatgaaaaagcgcccctgatgaaggagcgctttcagcatgtgatcagaccgtatatttttcttcacggaagacggcggctgccgcttcacgttttttctgaatgaggtttttcggcgtcaggcgcgtcagtttgcgcagcacggaaagcatcatccggagggaatctccttcctccatggcgatcagtgattctttggcgtgcgcttcaatgttctgaagggcttcctgggcaaagatttccgtatataacagcttctgcgcggctttttcggcaccgtccgccgcaattgctttttccgttctgaggacggctgattccaaagcgtacagcgcgctgacaatatcggcaatgttcaccatgatttcctgctcgccttcgatctctttgccgtatttctgcgccgcgagacccgctgtcaagagggcgatctttttcgcctgtctgacaatgtatttttcctgttcaagaggttctgagcccggctcttcaggcatcagcatcatgagttcttcttggagcgcttttgctttttcaaagagcggcagctgaccttttacggcttttttcaggaacgtgctcgtgacgatcaggcggttgatttcatttgtgccttcaaaaattctgttgattcttgagtcgcgataagcgcgctccacttcatattcctgcataaatccgtaaccgccgtgaatttgaacgccttcgtcggcaatataatcaagcgtttcagaaccgcacattttgttgagcgagcattcaatcgcgtactcggcgattgacttcgcgacttcgcgtccgtctttttgctcctcttccgtcagtctgctcatattatcttcgaataagcccactgttctgtatacagagctctccatcgcgtaaagccgagctgacatcgtcgcaagcttttcctgagtgagcgtgaagcttgagatcggcgttttaaattgccggcgctggttcgcataagcggcagacagctcaatcacccgttttgaagcgccgattgtgccgacggcaagcttgtagcgcccgatattcagaatattaaaggcgatgacatgtccttttccgatttcgccgagaaggttttctttcgggacttccgcctgatctaaaatcagcgttcttgtcgatgaacccttaatccccatttttttctcttccgggcccgttgacacgcccggatagttcttttctacgataaatgcggaaaatttatctccgtccactttagcgtagacgacaaagacatctgcaaaggcggagtttgtaatccattgcttttctccgttaagaatatagtgtgtgcccgcttcattcaaaacagccgtggttttcgcgccgagggcatctgaacctgaaccgggctcagttaaggcgtatgccgcgattctttgtcctgaagccaagtccggcaaataggtttttttctgttcttccgttccgaagaacacgatcggcaatgagccgatcccgacgtgggcgccgtaagacagcgaaaagctgccggcacgtgaaaacttttccgtaatgaaagctgaactgattttatccaggccgattccgccgtactcttcaggcacgtctgctccgaggaggccgagatctccggcttttttcagcagtctgaccgaatgctcgaactgatgattttcaatttcatcgatataaggaagcacatcgtttacgacatagtcttctgtcgttttgccgatcattttgtgttcgtctgtaaagtcctccggagtgaatatttgatcatatcccgtctcttcaatcagaaagctgccgccttttttgacgttgaccgtttcctgtttcatgttcgtttccccctttttttaaatgagttcaaatacgccggcagctcccatgccgcctccgatgcacatcgtcaccacgccgaattgctcgtttctccgtttcatttcatgaatgagtgacagggtcagcttcgttcccgtgcatccgagcggatgtccgagcgcgatggcgcctccgttgacgttcactttttcttcatctatcccaagcgatctgatgacttgaatggcctgtgaagcaaaggcctcattcaattcaaaaagcccgatatcctgcaattcgagtccggcaagcttgagcgcccgcgggatggcttcaatcggaccgatccccattacctcaggcggaacgccccctacggcaaaggaacggaatttgacaagcggcgccaatccgagcgacgaagctttttcgcgatccatcagcatgacagccgccgcgccgtcacttgtttgtgaagagttcccggccgtcacggtccccgttttagaaaaagccggacggagcttcgccaagacgtcagccgatgtgccgggacgaacgccttcatcttgagaaaagataaattgttttttccgcggcttatggtcatcaccgacttctgtcagcgatacttcaaccggcacgatttcgtcattgaatttcccttctttaagggcttttgcggcattctgatggctgcggacggcaaatgcatcctggtcttctctggatacgccgtacgtttcggcgacctgctccgctgtgtgccccatgctcatgtaatactcaggcgcatgctccgccaaagcgatattcgggcgggtcacatgtcccatcatcggaacttgcgacatggattccgcaccgcccgcaatgacggtgtcacccgcgccgatcataattttttcagcaccgtaagcgatggattggagcccggaagagcagtagcggttcaccgtaatggccggcaccgtatgaggaagccccgccagcgcaccgatattccgcgccatatttaatccttgttcggcttcaggtgttgcacagccgataattaagtcatcgatatttccttcatagccgcctgcccgtttcagcgtttcttttacacaaagcgcacctaaatcatcaggacgaacggctgcaagcgatccttttttcgctttaccgaccggggttctcgcaccggccacaatgactgcttctctcataaacaccctcctagttccgtaaaggtttgcctttgacgagcatatgctgcattctcgcttgagatttcgcctcgccagcgaggcttaaaaaggcttctctttcaatctcaagtaaatattcttctgaaacctccgtgccgaacgggactcttccgccggcaatgacatgggccagcttcttcgcaatcttcatatcgtgatcggataaataacccgaccgtctcatttggtctgctccgagcagtaatgccgcacacccggtttccccggtgactttcacttttttgcgggcaggcgggcggtatccgctgtcatataaggaagcagccagctgtttcgcatcgtgcagcaggtgatcctgattcatgctgatacggtctgccgcggacaaaatcttcatatcacgggcttcgtgtgccgaaccggacactttggcaagcgcgattgtttcgaaggttttaatcgctgcgtccatcagttcacttccgccgtccaaataattcatgtacagctctttgtttcctccgccgcccggaataaggccgacgccggtttcaacaagacccatatacgattcgctcgccgcctgaacgcgtgccgccgggagacagacttccgtgccgccgccgagtgtcatcccaaatggcgccgcgacaacgggtttagcgctgtatttgatgttcagcatcgtctgctgaaaacggcggatgacaaaatcgacttccatgaagttatcatcctgagcttccatcaaaatcatcgcaaggtttgcccccgcgcagaaatgtctgccttggttaccgatgacaagacctttataattccgctccgtttcctcaagcgcattgtcaatcatctgaataatgtctaagccgatcgcgttgcttttcgtatgaaattccagcagcgcgacatcatcgccgagatcaatcagactggctccgctgtttttagtgataacgccttttgtttcttttaacgtttgcaggctgatccgtttcggattttctttcacagccctgtattggccgtctgaatagtaaaatggtgttccgttttccttcatataaaatgtgtcatggccctgattaagcatttctttcacccagccggggagtgctgcgccttcttcttcgagccgctccgctgattttctgacgccgatggcatcccacatctcaaacggtccgagctcccatccgaagccccatttcatggcgtcatcaattgctttgatatcatcagcgatctcacctaaaagccgggctgagtataagagtgtttgcgatgtaatattccaaagcaggcgcccggcgcggtcatcagagtatataagcgctttcattttgcctttggcaccctttgcctgtttggcggcttctaaagcgggtgtcttcattttcgagcgctcaccgtatgtcatggtcagcggatcgagttcatatattgttttaccttcttttttgtaaaaaccttggcctgatttgctgcccagccaattgtttttcagcatgtcattcataaattcaggaagcttaaacatgtctttttcagcgccgtcggctttatcatacacattttttgccacatgggcgaaagtatcaagccccacaacgtcaagggttctgaaggtcgcgcttttcggtctgccgatcaaaggcccggtcaccgtgtccacctcgccgatgcggcagccggaagaaagcatttctcttaccgtgaccagcaggccgtacgtaccgatgcggttggcgataaagttaggcgtgtcttttgcgatgacgacccctttcccgagcgtgttttctgcaaatgaagtcataaactccagcacgtcaggatctgtttcctgaatcggaatgatttccagaagctttaagtagcgggccggattaaagaaatgggttcctaagaaatgagctttaaaatcggcagatcggccttccgccatttttgtgacggagataccggacgtattgctcgacacgatgcttcccggtttccggtattcatcaacgagtgagaaaatctgtttttttacgtcaagattttcgacgacgacttcaataatccaatcagcatccttcaattgagctgcgtcatcttccaaattccccgccgttatatagtcgagattggcagccgaagtcagcggcgccggtttttgcttcagcagcttttgcatggccgatcggctcagtctgctgcggacctccgggctttctaatgtcagcccttttttcatctcatcctttgtcagctcgtttggcacaatatcaagcagcaggacgggaattccgatgttagccaagtgcgcggcaattccggaccccatgacgcctgatccgagaacggctgctttctttataaacttgtgcatgagtcatcccccttgaactttgaatgaatagtcattcattttttcggcaaaaaaaatgaaacccttttcttcttacatcttaaaagattttcaggatgacttcaatagcaaatatggaatttttttaaatttttctgcttccgcatgttccatggcgcgggcgggaaacttaaacccggaggtgaagggaatggtgcgagggagaaaagatccgtcttctgccgcagtgagcgcggccagcatgaaaggaaatgcgggaccgaagcaaaaatacggcggcggcaaacggacgagccaaaatcagcaatataaaaaagacaacatggaataacatgctgcggctgctttttggagcagccgttattttttgaagatccctttcagcacaaatgccgcatttgccgggcgctcggcaattcttctcatcaggtacccgtaccaatcggttccgtacgggacatacaccttcatcctgtatccttcttcggcaagctccttctggcgctccgttctgatgccgtacagcatttggaattcaaactgctcccggggaatctgatgttcgctgatgagtgttttcgtaaaagaaatgatgtcatcatcatgtgtcgccaccgccgtttcatggccgctcaaaagctgcagcttaatcagctgctgaaaatgaagatcggttgcttttttatcagggaatgcaacagccgccgattctttataagcgccttttacaagcctgagccgcggcttgtatggcatcagaccgctgatatcttcagctgcgcggtacaaataagcctgaatgacggtgccgagcatcgggaaatccggcttgcaccgcttatacagctcaagcgtacggccgcatcttgaatagtcctccatatcaatcgttacaggcacgccgcgttcttttgcctccgtcaatatgtctctgacatgctgttccgcgagcttctcggaaatatccagaccgatggatgttaatttcagcgacagctcacaatccagttgattctcggcaatggccctgattgcttttttacattcttccgccgtccttttcgcatccttctctgaacccgcatattcacctagataatcaatcgaagccgacagccctttttggttcagccgctttaccgttttcacagcttccgtgagtgtttcccccgcaacgaaccttcccgcgccgaagcggattccgtaagcctgggcgaattttgtaagcattttatttttcgacaaaaataaacatatgctccgcagcaaggatgaactccctcctttttcttttattcgtgtatgaaatcccgatcgcagagaaagctaaaaagaacagaattgaaggaggcgtttatatgaacaaccaagagcagcacggaaacttgccgcctgccgtcatctcaacgaaagaccatttgtatcttgaggacatgctgaactggaatctgcttgccatgaaaaaagcgcattttatggcggatcactgccagaatcagacgttaaaacaagagcttgatcaaatcggccggatgcatcagaagcattatcagcacatattgggccgcttgaaccccgatcaaggcggacagacaacaacaggctatatgcaataggaggacaatacatggaacagcaaaaccaaaaaatcacgaatccgcaaacgcccgtgcccaatacggcgcaaatgaatgacagagacttggtgaatgagctgctgacgacggaaaaatacatcacggcttcatattgcacagccctgcacgagttcagccacgagtctctttatcaagatattcaggcgattttcgatgagtcacaaaaagcgcaaagaagattatacgatgtgatgtttcaaaatggctggtattccattgaagcagccgatacccaaaagcttcagcaatcgtatcagaagttccggcagaccattcagcagcagtctccctaccagcagtaaaacgaagaaggatttgatgttttcgacaagcatcaatcctttttttatttttgcacaaaaagattgacttgtcattaatccttatttatatttaactaatgttaattattttctcaaggaacaagatgaggaggagttatgaaaaacgcggatcaatatgtgtctgacatccagaaatctcttcagacgctgctgcaaaacatacagcctgaaatggtggaaagcatggcaaaacacgaggtgacgcctgcccaattatttgttttagccagcctgaaaaaacacgggagctgcaaagtttccgaaattgcagaacgcatggaggtaaagccgagtgcagtgacgctgatggccgaccgcctcgaacaaaaaggacttatcgtccgcaaacataaccagcaggacagacgcgtcatcgacatcagcctcaccaaaaaaggcgaaacaaaattcgaagatgttgtggaaggacggaaagcgatactggcgcgaaacctatccgttctgactgaagatgaactgattcagtccgtgaacatcatccgcaaagtagcggaagccgccgagaaatacgcggctgagcaaaaagaaaacgaatagaaaagaggagctgccgaaacatgagcattgaaaagaaagatccaaaacgcacattattaataaccggcttaatcatcgccatgtttttctcagcccttgacggcaccatcgtaggaacggcgattcctaaaatcgtgggtgacctcgggggattaagcatgatgacgtggctgaccacggcatatcttttaacttcgacgacgatcgttccgattgcggggaaacttgcagatttattggggcgccgcgtcgtctatgtatcaggtttattgatttttatgggagcttccgcactgtgcggaatggccagcaacatgacggaactgattattttccgcggacttcagggaatcggcggcggtgtcatgatgccgatggctatgatcgtcatcggggatttgttcacagggaaacagcgtgccaagttccaagggcttttcggggcgatttacgggcttgcttccgtgatcggcccgcaaatcgggggctggattgttgactcattaaattggaaatgggttttctatatcaacctgcctgtcggaattttagccgtgatctttatcgcaagaggacttcaaggcagaaaacagaccgggccgattaactttgacatcgccggcattttcacaatgatcgtcggaatcgtcagcctcctcctcgcgctcagcttcggaggaaaggattacgcatggggctcttggcagattctcggtctctttgcgcttgcacttgccgggattgtcggattcattttcgctgaaatcaaagcaaaagagccgattctgccgatgtacctgtttaaaaacagaacgtttaccgtactgaatctgatcggctttttcatgagtatcggcatgttcggcgccgttacgttcgttcctttctttatgcagggaattatcggagtcagcgccaccgcttccggcacgattatgacgccgatgatggtatctatgattatcacaagtattatcggaggccagctggtttataagatcggtattaaaccgcaaatcatgatcggcatgctgatcatggccgtcggcttcttcttattaacgactttgcagctggatacaagcaagctcgcggctacatgctatatggccgtgatcggtctgggaatggggctcgtcatgccgcttctcacactcgctctgcaagaaacgttttcaaaagaagagctgggtgttgtgacctcttcaagccaatttttccggatgatcgggggaacgttcggcattacggtgctcggcgctgtcatgaatgccagatcaggaagccttttaaccgacagactggtgccttacttagactcactcccgaaacaggcaagtgcctttgccgcccagtttaaaggtatgattgacaagaatcctgaagggctgcttcaatccttgttcagccaggaatcgattaagcagattccggccgcattttcttcccatatcgtgccggttttgaaaacgtcactgatggattcgcttcacagcgtgtttttcacaggcctggcctttatcgctgccggattaatcctcacgctgtttgttaaatcaattaaactgacaaacaaaaagacaggcaaacaagaagaaaaggcgaaagccgtttaacaaagaaaaatcccgcggatgccgcgggatttttttatatcatctgggcctctccgtttccgaatgaccagtcttccgccgcattgcctgagaggacgataaacacatcttcttttctgacgcccagcttttcgtgcagccggtcagccaaatgctgatagaatgcttgtttctgatgagttgttctggagtttttcaaagtaaagcggataaacatcagttcatcgctccgctcaacttgaagatatgacggatcatagaaaaactcccctttttcgtgctggtgcaccacttgaaaatagtcaccatgcggaacatcaatcatctccgtcatcgcggtatgaataacggcgctcatttttttaagccaaaatccgcttttccctttctgtaaatgaatctgtacaaacggcatcatttctctctcctttcgtcacatcgtctggccgcaatcggctgttatgatttgtcccgtcagtgattcctgctccagcacagagcaaatcagttcaccgatatcctccggagcagcgatccgttccagcggaaggcttccggcaagccggtacatcgtctcttcccgacccgtccaccatcttgttgcaacggctccgggcgcgacacagcatacacggatgtccggcgccagcgcatgggccaatgattttgtcaggccatgcaccgccgctttggaaacggcatacggaagggaagaacccgctcccgtcaggccggcgatgctcccgacattcacaatagcgcctgacttttgctttttcatatgagacgctgccgctcttgcgcaatgaaacatcccgtttacattgacagcaaataattcatcccatacttctttcgttgcagattccaaatcatgaagcggaatatgtctggtgatgctcgcattatttacgagtaaatcaaggcttccgaatcggctggctgcttcgttcaccatgtctctcgcctgtttgtctatagaaacgtccgcttgaatggtcatcgcgtgtccgcctgcttttattatgaattctgccgtttgttccgcttccgattttgaatgtgaatagttaatgacaacagccgctccccgttttgctaaggcaaggcacgccgctcttccgattcctgtaccgccgcctgtgaccagtgccgttttatgttgtaaattcatggcttcttctcctcttacgttcgatgttcatcagctgatatgtttattgtaatggagatgtgcattttcgtataatgattgttaaagatgtttcatatcacaaaaaatgatagcaaagagggagagatgacaatggaaagcggagatttgcgaatttttcagatggtggcccgtgaaggttccattacaaaggcggctgcgcgtctcggctatgtgcagtcaaacgtgacggccagaatccgccagctggaagaagatttgaaaaccgagctgtttttccgccataaccgcgggatgacgctgtcttcaagcggcacggtgctcctccattatgcggatcaggtcgtcggtctgatagaagaagccaaaatggcgctcgcttcaacagacaagccaagcggaccgcttatgatcggctccacccagacaacagccgccgtcaggctgccgaaacttttagcctcttactatgagcggtatcctgatgtggagctgtcccttacgacaggacatacacaatatgtaaccgataaagttcttcgctatgaattggacggcgcatttatcggctgtcactttcatcatccggatttgcactccatcccggcctttgaagaagaagccgttgtcgtgactcccgctgccgtcaccgctatagaagaagcggtaaaaaagccgcttcttgtgtacagcacgggctgcacgtatcgtgacacattagagcggtggcttcattccattggaacggcgcatccggccattatggaattcggcacccttgaagcgattatcgggggagtgacagcggggctcggcattacgctgctcccgcgaagcgtaattactcagcacgccgcactaggcgcggttcggatatggaccattcccgaatctttcagcatgatgaaaacggaattcgtcacgcggaaggattcatatatgagctgtgcattacgggcctttattgattccttttcagcaaaaaaagcttccggcacctctctttgatgccgaaagctttttattgttttttatgtgctcttcattgagctgtttaatgtgctgtgccgcggctttgatgccctcttggcgtccgggcaggattcgttccaatgttttacgttcagcaaatatctaattatgatcgaaaagaacaattgaaaaaatccacgagatccgtatagcaaaacggctctaatagcaggcttttaaaaccaactaaaaacattaaattttaacagcgtgtcaaaggaagccggcattgcaaaagcaacgttgtataacaacaaggggttccgttcgaaaattttaaaattaagaaaccaacaatcgcaagtacccaccccgcaacaagtgaaacggggaatgagtgtaagtaacaaggaccccctcattacatccctaaaaagaaaacatcaaaagccggagaaggggtgtcctttttcttatgccgctaacggtgcagttgagtaaggggtaaaaattcaaaaaaatagtgatggaattctttaataaaccttaaacatttcatagttatctttatagtacgacataataaagtcacgaaaatttcttaccgaagaagataacagcttatgtctcatccaagataagccgactggatatgaagcagagtgatcagtcacttttataaaattcagccccaatgttctgcaaactgaaataggaagcaacgccacaccttgatccagctttataatctcgaccagtaaatgagaatctgcctcaaatgcaatatttgggatgaaaccagctttctcacaaagcgaggctgtaaaaccgctatactcttcgttattagcaagggtaataaatggttcatcggcgacaagacgtaaagaaatttctgttttacccgtaaatcggtggtttgagggcaaagccagaacaatatcttcatttaccagcacccaactctctatctcttcatcttgaatcggatgacctgttattcctaaatcaatgtcccctttttttaaacttgttatgatctcgcttttaactccgattgcttggagaatttttgattgaggagagcggttgatatattcactcatcagtcctgcaaggaatcttggattggaaatagatattctgatggtgtcagaaattcgatgttcctccaattgaatttccgtttgtgcattttcaatctcagtaaaaatcctgtttacacgttttaaaagaattttccctgctgaactcagcttaatatttctgccttttctctcaaacaaggttgttcccagttcattctcaagtctttttatagtgagacttaaagaaggctgggcaatctttaattgttctgctgctttagagatatgttcagtataggcaactgtctgaaagtattttagctgcagcaattccatctgtctgcacccctctcatttatttcaataaatatatatataccttattatgtattggattaaatgtaaatgcgaatgtaagataatagcatagttaaagaaaaggaaagggagtcattcaatgaaaattgatgtgaaagatatagcaaaaaatttaaatacgccactaacagcccctgcttatcctatcccaaattataaatttgttaaccgtgaatatttaaatattatttaccgaacggatgaaaaagctttacgtgcagcagtgccggaacctcttgaaattactgaacctttagtgaaattcgaagtgatgtggatgcccgatgtttccggacttggtgcctatacagaggcaggacaagtcatccctgtcagctttaatggtgaagaaggagattatgtacattctatgtatgttgacaatttcccggctattgcaagcggacgggaacttactgcatatccaaagaaattgggtgcccctaagctgtatatagactctgatactcttgttggcacattggattatggcagtcttcgtgtggcaactgccactatgggatataaacatttcgaaatggacaaggaaaaagcgaaaagggaaatttgccgacctaattttatggttaagattgctactgattacaatggtgatttaagggtttgtgatttggtgcggacgcaaataacgaatatagaagttaaaggtgcctggactggaccggcgcggcttcaattatttgaacatgctctggcacctcttgcagatttgcctgtattagaagttgtttcagcatctcatatccttacagatttaaccttaaatgcagcacagccggtttataactacttagaggaaaaataaggagacgtttacaatgagaattgcagttttaggagcaggttctttaggaaccattgttggagcatatctgtctgctggcggaatggatgtcgaattgattgattcgtacaaagaacatgtagatactctaaatcaaattggtgctaaagtagttggtacaacggaatttcaagcaaaggtgaaagccattacccctgaaaacaaatcaggcaagtatgatttaatattactcctgacgaaacaattatataatgattccatccttaaagagttactgccttttttaaaggatgacagtgtagtatgttccttgcaaaacggtatacctgaacagaaagttgcttcgatcgttggtgatgaacgtgttattgcaggttctgttgaatttggtgccacgtttattgaaccaggcgtatccagacttacaactgagtatactcaatttaaagagtacgcttttcaaattggagaattacatggtgaaacaacagaaagaatccagcgtattaaatcggttttagaccttatcggcggaacacatatttccgataatttagttggaacgaagtggtcaaaattacttatcaataatgcattcagtggtttatcggctgcattaaacggagaatacggagacattcttgaccatgaaatcggcattgttagtgcagtccatatcgcagatgagacgattaaggttggacacgccaatggtgtcaaatttgcgaaaatgggcggccttgatttagaatctttggaattaagaagtgaaaatgatattcctgaacgtatccaaacatttaggtcagccatggaaccatctaggctgctaagagcaagtatgctccaggatcttgagaaaaaacgcaaaactgaaattgattatattaatggagttattcccaaaatggcagaaggtactggcatttcaacaccttttcatgatttggttgtagcacaagtcaaatgtgccgaggaatctcaaacagtgcccaattttgatacaaatataaaagcatttgaagagttattacgtatccgaaaggaaatgtgatatataggaaagagagaaagggattgctgcggcggtccttttttcttggttcagcgagcggaagaaatatacgtaaacaaacgggtgcattagttacattaatgttcttcgctatgaattgaacggcgcctttattgattccttttcagcaaaaaaagctttcggcacctctctttgatgccgaaagcttttttattgtttttttctgtgtgcttcattgagctgtttaatatgctgtatcgcagctttgatgccctctttggcgtccgggtaggattgattccaatgtttgacgagcggaggcatgctttttgcgatatgtgtatacaaaatccactgcctgacttcttcctttacatccgggtttgtttcgccaagcaatagttccgtgtatttttcaagcaggccgtccagctgctgctgcagtttctcttccataccgttcccttcccttttccatgattatgacaatcgggcggtgagggccgcttcctgcacgatacatctgccgcgtccgtgcggaatgcaaagcggcgtgccgaacagcggatcttgcgttacctggcagttcatcgcaaagacctgctgtacaagctcgcaagtgatgacttcttcgggacggccctctgcgtaaatctgtttatccttaatggcgaccagataatgggcataacggcatgccagattgaggtcgtgcagcaccatgacgattgtgcgtttttctttttcatttaattcaaacagcaaatcaagaatttcaatttgatgcgtcatgtcgagataggttgtcggctcgtcaagcagaatgatatccgtatcctgagcgagtgtcatcgcaatccatgcgcgctggcgctgtccgcctgacaaggaatccaccggacggtcggccatttcctcaagcttcgtcgctttaagcgcttttgccactgcgtcttcgtcctctttggaccattgcttcagccagctttgataagggtatcttccctgcttcacaagctgatgcaccgtcaggccttcgggagctgacggactctgcggcaaaatagcgagctctcttgccacttccttcgtcggaagcttagcgatggcttttccttctaaaagcacagaaccgcccctcggtttcatcagccgggccaatgaacgtaaaagcgtcgattttccgcagccgttgcttccgatcaatacagtgatttcgccttttggaatcgcgacatccaattcgtcaatgataacagtttctccgtaccctaagctcagcgtctctgtagaaattgcactcataccgctaaccgctccttttttgagtttcccaacactatgtatataaacaaattgcctaaacattcaacgtgagatcatgattatattgtaacagaaattaatgactctgaatatcattatcaattagttttgggcaaaaaagcagcgggcggcggttatttttttatttccgtcatttctccatcattctttttcagtttcagataaaaatggtcatagcggctgtccaaattaaaagccgagagcacctgccggacgacctcgctttcctgcatccggctgtttacggcaagttctccgaggatcatcttcatttcatcaagcgcttcctcgccctctctgtgaacccctgagagcttgtcccggatgtcagccttttcatgaccgtcttttctttcatacaaaccttcatagcggttatgctctccggctccgtagctgacgcgaagggaaaagctgctgtaaggaaccggcttcgcggatgatacgggtgtgctgtcttgttccgcttcccgtttttcttcattcaatcggcagccggcaatcagcatcagcgtaagacataaaacgcccgccgttctgatccatttcatgcggttcactcccattccattccgatcgtttttaggtatttccaagggaggcggctgtcattcattaaacaaaaaagaaccggagcgataacactccggccggttcatctcaagattatcattcagtcagctctaaaaattcctgcacatcctgtacggcaaggcggaccgcgtcttcccaaaacgaccgttccgtcagatccgctccaaggtgcttcatcgccaaatcctcaacagtcatcgaagccgtgtcacacaaaagcgcgatatatttttcttcaaaatccgcgttttcccgaagagctcttgcatatattccaagcgaaaataagtaaccgaacgtatacggaaagttgtaaaacggcactcccgtaatatgaaaatgcagtttcgacgcccagaaatgagggtggtactcccctaatgaatcgcaaaacgcttctttctgcgccgcttccatcagttcattcagtttctcagccggaacgacgccctgcttgcgctcttcataaaaacgcgtttcaaataaaaatctcgcatgaatattcataaacatggctacgcttttttgaattttatcttcaagcaagaacagcttttcatcctttgtctccgcttgtttcaaagcggcgtcggcgacgatcatttccgcaaaggtcgaggctgtttcagccacattcatagcgtaggctctgttcagctgccgcacttgaagcatggcctcctgatggaacgcgtgaccgagctcatgcgccagcgtcgatacattcgaagcgcttccggaaaacgtcataaaaatccgggattctccgctgtcgggaaagctggtgcagaaaccgccgacccgtttgccgctgcggtcttccgcttctatccaccgatcacggaacgctttttccgtaaatgcggacagctttttgccaaacgtcgaaaattggctgacgatcagattggccgcttcatcatatgtgtattctttcggagcctcgccgatcggcgcgtccacatcataccagttcagccgctcaagccctaaaagagacgcctttcgattcaggtattcggcaaaaggctttttatgatcggtaatgacctgccacatgacatccagcgtttcttttttcatccggttgatcgcaagcggctcttccaaagcgcttttccagccccgcgctttatagatttccgtgcggaagccggccagatggttcagcgtgctgccgaaaagctcctcttctcctttccacgcttcattaagctctttgaacacttgacgtctgatccgccggtccgggtgcgccatcatattttccgcttggccgaccgacagctctttatcctcaaacggaatcttcattctgccgacagccgcattatacaggtcgccccatgcgtgatagccgtcaacggccaggccttcaatcagcctttcttctgaagcgctgagcttctctttgacacggtctcttctctcatttaaaacatatgtgagatcctgaagttccggtttttgcagcagctcctcccagacccgctcgtcaatccgggcaagtgtatcgtcaagggtgaccagagcggatttaaaatcactgctcagctgattgatccgcgccctccattcattcgctttctgatcatgagtgttctgagcctgaagacagccgacgaacgctcccgcctgcctgatcatgatcgctgaccgttcaaacctatcaatcagattgatcagctcccggctttcatccgcatgcgtcggaactgtaaatgcttcaaccgcatgttgaaaagcgcttagatgctttttgagctcttgtatgtattgctgaaactcttccgaccggctcccgccctcaaaaatggagtttaaatcccatgtttccttcaatccctctaatgccatcttttctttacccctttctatccgaagctgactccattataaaacaattctgacatatttccgaacgatttctccttctttctgcgagatgttatacactatgagataagaacaaacggggaggattattatgaacagaaaaattgccattgtaaccggcgcgacgagcggattcgggctgctgacagcgctgaagctcgcccggtcttatcacgtcatcgcaacagccagacagccggagaaagctgaaatactgaaagaggccgccgctcaagcgggtgcatccgaacatgttacggtcgtttctttagatgtgacaaatgagcagtcggtgtctgacttcgggaacaccatcagcggtttcggaccgattgacctgctcgtcaataacgccggcactgcgtacggggggtttattgacgatgtactgatggaacattacagacagcagtatgaatcaaatgtattcggtctgattcacgtcacaaaaaccgtgctgccttatatgcgaaaacatagcggggcgaaaatcttcaatatcagcagtatcagcggactgaccggtttcccggctctatctccgtatgtctcttccaaattcgcggttgaagggtttacagagagcctgcgcctcgaactgctgcctttaggaattgatgccgctttaatagaaccgggctcctataaaacgtctatatgggagacgtctctgtccaatcatcttacggcacccggcaaagattcgccctattaccgctattatcagcaaatcgaagcttacttcaaagccaacgcatccaaaagcggggatcctgatgacgtagcggagctgatttatcaattggcacaaaggaaacggctgaagaaactgcggtatccgatcggcaggggcgttaagctgacattggctttccgctcactctttccgtggtctgcctgggaatcgattataaagaaaaagctgttcacttaaacctaaattataattattataatttagtattgatttttatttaatacgtgatataattaaattatcagatcacagggaggacgatgaatatgaatacacaaaacgcgaaaaaaactgaaactcttgttgagaaatcaatgaacacacaattatcaaactggtttatcctttactctaaactgcaccgcttccattggtatgtaaaaggccctcatttctttacgcttcatgaaaaatttgaagagctgtataacgaagcggcggaaacggcggatgccatcgcagagcgacttctggccatcggcggacagcctgcggcgactttacacacttaccttgaacaagcttccattacggatgaaggccaagaaaaaacggcttctgaaatggtggaatcactggttcaagactataaacaaatcagccgcgaatcaaaatttgttatcggcatcgccgaggaacaaaatgacccgtcaactgccgacctgtttgtcggattagttgaacaagcggacaagcatgtgtggatgctgtcagcctacttgggagaatgacgaaaaaagctgaacctcagttgcaggttcagctttttttatgtgttcagcttgcgctttcggtttgtttcgttaatgtgacgttcagcgtctttttgcttccgcttctgagaacttgaacagtcgttttatcgccgattttcagctggttatataagatttgtctgatatctgcgctgctgccgacatctttgccgttcaattgtacaatgacgtcatttgatttgatgcccgctttcgcagccggtgagccggactgcacttcttttacgtaaacacccttagacagctggtcgccgaacagtccgagcgtgttttcctgataggtttccggcacttgcgccatgtcaatcatctgcacacctaaaaatgggcgctcgacttttccttttgcaagcagctggtcgactatcggttctacatcattgctcggaatggcaaagccgagtgactccacgccgttttcactgactttcatgctgttgatcccgataacttggccgcttgagttgattaacgggccgccgctgtttccggggttaatcgccgcatccgtctgaatcacgttcatttccactgtgccttgggatgtatcggcgtctaccgttctgttcagcccgctgatgacaccttgtgtgacggtgccggaaaactgctggccgagcgggttgccgatggcaatcactttatcggcaatgcggagcttggaggaatccccgaagctggccgcttttttgacattggacgagctgatttccaatacagccaagtcactgatggcatcctttccgacaagctttgccgtttcggttttcccattgtaaagagtgaccgacagtttgttcgccccttctacgacatgattgtttgtaatgatgtacgctttttcgccgtcttttttgaagatgacgcctgaccccgtgccgctttccgtttcagagcttgaaccgccgtcaagtccgaactggctgctttgcgaagcttggtagttggacactccgacaatcgcaggctccaaatcttctaccatatccgctacacttgaggtatttttcaaaggcgttgacgtaaaattcgaagactgaacttgtttcgtatcagaaacggcttctgtcttatgctgctcacccggcaggtttggcacaatgccaagcacgaggccgccgccgataatgccgcctaaaatcgggctcagccaagcggctctccgttttttttcttttttcacggcagccgttttttcaaattccgtaccggccgccgtctcgttttccgcttctttcgagacgggcccttcgagcagctcgggctcctgatggctgatctgctgctgttcatttctgttttgttccgtatgtgaaagatctgactgatcgcggcttctgccgtcatctcgatgatcattcatattcacgcacactccttcagcatgttttcattctatcgattacatattcatcgcatgtacaagttctattgtcccaataataaggagaaaagcaaagctccaaaacaaaatgtgtttgaacatgttatcttccccgctttttttcttcctttcttcccttatacacatcataaacaaacattgtgggataaaaatgaaaagaatatgtgaaattatgaaaatgcggcttgagtgtgttaaaactagtataatgacgttgaaaggatgtgaaatgccttgtcatacaccatttatctagttgaagatgaggataacctgaatgaactgctcacaaaatatttagagaatgaaggctggaacattacatctttcacaaaaggcgaagatgccagaaagcagatgcagccgtctccccacttgtggattcttgacatcatgcttccggatacggacggctatacattgataaaagaaataaaagaaaaagatcccgatgtgccggtcatttttatttccgcgcgggatgccgatattgacagagtcctcgggttggagcttggaagcaatgattatatcgccaagccttttttgccgagagaacttattatacgggtccagaagctgctcgagctcgtgtataaagaacagcccgccgcaaagaaaaccggcatcaccgtttcttcctacaatgtgatcgaagatgcccgagaggtttatgatgaaaccggctgcctggtcaatttgacgtctaaggaatttgatctgctgcttttatttcttcaccataaaggacaccccttttccagagaagatatcctgctgaaaatatggggccatgattatttcggcactgaccgggtggtcgatgatcttgtgcggaggctgagaaaaaaaatgcccgggttaaaggttgaaaccatttacggattcggctacaggatgatgacgtcatgaaaaataagccgcttgcttttcaaatatgggtggtcatttcaggcatcctcttagccatttcgattctgcttctcgtgctgttctcaaatacgctgcgtaattttttcacggatgaaacgtatacgaccattgaaaatgaacagcatgtactgacggagtaccggctgcccggatcgatcgagcggggatattacagcgaggatgcgaccgcgccgacgactttccgatccgttcagcacgttcttctgccggaacgggaggaatcggccagtgacaaagacttgaactacttttcttcttcctttatccataaggtgtacaagctcgcgggccgccagcacagcgtcacgaaacgatacagcgcggacatcagcggtgaaaaagtatttttcgtcattaaaaaaggcctcaccattaacggccaggatgcgatgatgctgtcttacgcccttgattcttatcgtgatgatctggcattcaccctgttcaagcagctgctctttatcattgccggcgtgattttgttaagctggattccggcgatttggcttgccaaatatctctcgcgcccgctcgtttccttagaaaagcatgtcaaacggatttcaaaacaggattgggatgatccggtcatcgtcgacagaaaagacgaaatcggaaaattaggccacaccattgaagacatgcggagcaagctggtgcaaaaggatgaaacggaaagaacgctcctgcaaaatatctctcatgatttaaaaacgcctgtcatggtgataaggggctatactcaatcaataaaggacgggatttttcctaagggggatctggaaaccacaattgatgtcattgaaggcgaagcagaaaaacttgagaagaaaattaaggatttattatatttaacgaagcttgattatttaatgaagcagcgggtgcaccatgagacatttgacattgtgaaggtcacggaagaagtcattgaacggctcaaatgggcccggaaggaattatcgtggaccgttgaaacagaagatgcattaatgatgcccggtgatccggaacaatggagcaaacttcttgaaaacattctcgaaaatcaaatccgctatgcagaaacggcgattcacattcggatcagccaaaatcagcagcagattgtcatgacggttgaaaatgacgggcctccgattgaggatgagatgctatccagcttgtacgagccttttaataaagggaagaaaggcgagttcggcataggactcagcatcgtaaaacggattttaaccctgcataaagcatcaatttcaattgaaaatgaccaatcgggtgtaatctaccgaattatcataccaaagtagactgtagtgtttcattgcagtcttttttatgtgaaggaatagccgttaaaatctctgtagtttgctttcagcggtttttggcattgatgaacccatttcttttcacaaattgtctttttcggatatttcaccttttcgactttaattcctctgtttcgcaagcggctgatcatttcatctaattctttcattttcagattcaccctttcgccagaactttgaccattcggtcagctcactttataatataaataaaacaaaacaaaaaaacaagttacaatcaggttaaatttacggaatatcaatatgaccatatagtcatacatgagaagcacaagccagcctcctggctccgaaagggtggaaccattgaaggaaaaagaaaagctgatcattgaagcagcaattaaactgtttgcccgaaaagggtacaaatctacatcggttcaggaaatcgccgatgaatgcaaaatctcaaaaggcgctttttatctaaactttccttccaaagaagcactgcttctatccatgctgaattactactatgataaaacgtttacccgaatcacgacgatccaaacggagggtgacagtccgagagccgcttaccaaaaacagcttgcggtgttttacgaatcgattctcgcccatcaggattttataaccgtgcagatgaaagacggttcacttccttataccgaagaagcggcgcagtgcggaaagagaatccgccggtcgatcctgcagtttcatatcgacagtcttcttgcgatttacggagaaaaagttgaaccatacacagccgagctttgttttttaatagaaggaatcagtcagatgtatcttgaatatctcattctgaccggccggtccgtacagccttcgcttttggcaaataccgtgattcacagaattgatgacatcgtaaacggaatggcggacagacatgatgaagcgtttatttctcttgatgaggcaagctcactgtttggcccccttcataacgggcagcccgatcctttaagccaatcgatcttgcagaccctccgcacgcgcatcggcacgatggacaagacgcaagcatctgaattcaccgagagcttggatattctggaagcggaaatgaagaaaaagtcgccgaaaccggcaatcatcaaaggaatgattttgaatttgaaggaatccgacctgctggctgaagatgcagaacagctcagatttttactgaaacagcagtttatttagaagaacggccgcaatgactgcagccgttctttctttttatgctttcgggtgcaccatatcttccggacgcaccatttcattaaattgttcttctgtcagaaggttcagctgtaatgccgcttctttcagcgtcaagccttctttgtgggcaagcttggcgattttcgcggcgttttcataaccgatgtgcgggttaagcgccgtaacaagcattaatgagttagagagattttcctgaatcgtctcttggttcggctcaataccgacagcgcatttgtcatggaaggaattcattccgtcactgagcagctgcacggtctgcaggaagttatagataataaccggtttgaagacattcagctcaaagtttccttggctggccgcaaatccgattgtcgcgtcatttcccatcacttgcgcggcgatcattgtcagcgcctcactttgcgtcgggttgactttgcccggcatgatagaacttcccggctcattttcaggaatgacgatttcgccgattccgcagcgcgggccgcttgccagccatctgacatcgttggcaatcttcatcaggtcggcagccaatgcttttaacgcgccgtgaacgtgagtgatttcatcatggcttgtgagcgcatggaatttgttaggagaactcttgaatgtctgccccgttacttttgtgatttcttccgcgacgaattcaccgaactgcggatgggcgttgattcccgtgccgactgccgtgcctccgatggcaagcgcgcggattttttccgttgactcaagaatcatttctttagaacggtcaagcatgtatacccagccgctgatttcctgtccgagcgtcagcggagtggcgtcctgcaaatgcgtgcgtccgattttcacaatatcctgataagctttcgctttttcatcaagcgtcgcgcgcagctgatcaagcgccggaacgagctgctcatatacggcaagaaccgccgcaacgtgcatcgccgtcgggaatgtatcgtttgagctttggctgcggttgacgtcatcattcggatgaatcttcagctcggaatttttttctttcaataaagcagtcgcgcggttggccaccacttcattcatgttcatgttgctttgcgtgccgcttcccgtctgccagacaacgagcggaaagttatcgtcgtatttgccgtttaaaacatcgtcacatacagcggcaatcgcctgtgctttttcagactctaagttgccgaggcgttcgttggcgatcgctgtgcttcttttcaatattgcaaacgccttcacaacacgctgaggcattttttctgaaccgattttgaagttctctttgctgcgctgtgtctgagcgccccaaaatttatctgccggaactttaacttctcccatggtgtctttttcaattctgtagtccatttatgtatccctccataacagttgcttcaccctgagtattattcgccagtaacagatgaaaccctttttatttttcggccttggccgtttttaatttcagctcaagatagacgcgcgaatccttagagtatttatacttcggatttgttttacggtattctttcgacgtgtaagccacttcgtaatgcgcttcaaatgatttgatgagctgttcaatttcttcggcatttcctgccagtctgacttgtgccacatctctcctccgctttcataaaaaaacttgtaccattaaatactttatcatagtatatcatttttttaacaggaaaagataacctcaattaaggattggaaggcgggtgactgtcgatggcgcaatcggaattcaaggaatacatacacgttaatctggcactggtgcttccccacgtagagcagaatgatgacctggttcaaaataaaaagatgcttccgaacgggcttgttttttattatatgtatctgagtgaaatgaacgacgaagacaaaataaaagaggcgattgaaacgcttcttcaggaggaagacactctgacgctggatacggtgacgaaacgtcttgataagatcgacgcccgtcccgtctttacgtcgaaggaagccgtcatctccattctgcggggaaaatgcgccgtgtttattaacggacttgacagcgtatacattttgtccacgggaaaaagagaaaaaagaagcgtgaatgaacccacatccgaaaaggtcgtaagaggtccgaaaatcgccttcatagaagattctgatacaaacgtcgccatgatcaggcagcgcacgaaccatccgaagctgaaaacgaaaaaggttccgatcggagaaaataagttaaaatacgccacggtcatgtacatagatgataaggcggacccgtctgtcgtcagcgatgttgtaaagcgcctcagcgaagtgaagatggacgacatccaggattccggaacgcttgaggagcttattgaggataataagtattcgccctttccgcaaatacaaaatacggaacggcctgataaagtctcttccgccttgttcaacggccgcgtcgccatccttgtcgacaactcgccgtttgcgctggtggttccggcttctttaggaattttaatgcagtctcccgatgattattatgaacggtggatttccgcctcgctcatccgggtgctgcggtttacgtctatttttattacgctgtttttttcgtccatttatatcgccctcgtttcgtttcaccaagggctgctgccgacatcgcttgcagtcaccatcgcggcgaacagagaaaacgttcccttcccgcctatcattgaagcgatggtaatggaaattacgatagagctgctgagagaagcgggcttgaggcttcccagcccgctcggccagacgatcggattggtgggcggggtcgtcatcggccaggcggccgttgaagcgaatattgtcagctccatcatggtcatcgtggtcagcattgtcgcgctcgcttcatttacggtgccgcagtacgggatgggtctgtcgttccgtgtgctccgtttcatttcgatgtttaccgcggcagctttcgggctgtacggcatgattttatttatgctggcgatctacactcatttatcgagacagcgaagcttcggttctccgtatttctcgccgaatggatttttcagcttaaaaaacgcaaacgactctattctccgtctccctattaaaaatcaaccaaaagaggcgaaaaacgtaaatgagccagaaaacaactcacaataagcttacaagctatcaagggacagcattgatttcaaacacgatgctcggcgcgggactcctcaccatgccgcgggcgctgtcatcaagggcaaattcgccggacggctggatcgcgttatgtctggaaggcgtcatctttatctttttgatttatctcaatacgctcattatgaaaaagcatcagtacggatcattatttgattatatgaatgaaggactcggcaaatgggcgggaaatatcgtcaatcttatgatctgtctctattttataggagtcgccagcttcgaagcccgggcgatggcggaaatggtcaagttctttttattggaaagaacgcccgtgccggtcacgctgtttatctttatcgcctgttccgtttatttaattatcggcggcatgagcgatatcggcaggctctttcctttctatttaacgattacgatcattattttgctggtggtgttttctttcagctttaaaatatttgatctcgataacctgcggccggtgctcgggcaggggttttctcccgttatggcttccttgaccgtcgtttctgtttccttcttgggaattgagattatgctgtttctccccgagtacctcaaaaataaaaagcacacattccgcgtgtcggccatgggctttggcatcccgattattttatacatcattacctacgttctcgtcgtcggcgccttaaccacccaagatgtcaaaacaatgatctggcctacgatcgcgctctttcaatcatttgaaatcaaagggctttttatcgaaaggttcgagtcctttttgcttgttgtctggatcatccagtttttcgccacctatgtatcatacggatatttcgcgacttcagctcttaataaaattttcgggctgaagcagaaaaagggcgtcatcttcgtaggcatcgcgacattcctcggatcattgatgccaaaagacgctaacaagctgatgctgttcagtgatattctcggctatatcttcttggttttctttttgctgcctttactgatgtttggagtcgtcgctgtgaaaaggaaggtgaaaaaagcgcaatgaagacatacatcgtaatcatcctttgcacattgcttttggccggctgctgggacagccgcaatttagaagacttgagcctcgttatcggagtcgggctcgataaacccgaggaagaaaatgtggaagtgacacagcagattctggttccgcaaaaagcaagttcccagcagtcgtcgtcaggcaatacgacaaaggtgacttccactcccggggaaaccgtccatcaagctttaaggacggcatcgttaaaaaatcaccccgcattctcccagcacttgcgcatcatgctgttttccgaagcgctgttaaaggatcacatcccgcttgacgcattgatgaaccaatttatcagggacaacggtacgagaagaagctgcaatgtgatgacggtgccggataaaacgaaagatattttcaaaatcagtgaccagggagaacctgcgtcaaatacgatctatgacttaacggagaataattcggtcaccatccggatgatggcgcccgtgacattgggggaaatatcagagaaaatcgccaaaggcgagacctttgcccttcctcaagtgcgccaagtgggcagcagactggaaatctggggcgctaccattattaaaaataaattctggtatgcgaatttaacgcctttacaagtccagaatatgaacctgttcacaggcacggtaaagggaggcgtcacgtttgcaaagcatgacaatcattatttatccttcgaagtattttccagcaaatataatgtaaaaacaaaatataaaaatggaaaattcaagtttatcgtaacccggtttgttgaaggccgtctgtctgaggattggaacccgaaagaagattctttcaaggagtcctatataaatgaaatcaaaaacgcggtaaaacgcagcattcattcagatgtcatggcattcattgattacatgcagcatgagttgaaagtggatattaccgggttaggcgatcaagtccggattcattatcccgataaatggaaaaagatatcctctgactgggatcatcacttcagtgaatcggatattgaatacaaagtcaaagtcgccatcagggatttcggaacaaagggaatgtcccaatgaccccgtccctcgggagagtgtgctggcgccgctctccttttcttatgtcacgagatgattgcggtgggcatatacggctgcctgcgtgcggtcactgacatcaagctttgacaatatattcgtaatgtgggttttcaccgttttaatcgtaatgaacagctcttcaccaatctctttattcgtcttgccttccgcgacgagacagaggatttccagttctctttttgtcagcgtttcatgcggaagctgattctctgaatggcgcagccttgacagcacttttcccgccaccttcgattcaagcttcggttcgcccttggcagccgctctgatggcttcggctatttctgccgccttggacgttttcagcaaatagctgagcgctcccgcttcgatcaccggatacactttgtcgtcatcaatgaagctcgtcagcacgatgattttcggatcattgagtgtcgcgcagatctgttttgtcgcttcgatgccgtccatgccgtccatgacaaggtccattaaaatcacatccggcaaaagcgctgcggccagatcgacgccctgctgcccgtctgatgcttcaccggcgacttcaatgtccggctgtgcttctaaaaatgcggccagacccatcctgaccatttcatgatcatcaatcagtaacactcgaatcactgtcgttctctccttttgttttctgataaatcgggactttcacgtcgatctgcgtgccttttccctttacggagataatttccgctatgccgccgatttcactcgctctttccttgatggaatgcaggccgtatgaggatgctttcacttgatccatcgtaaaacccgccccgttatcaatgactttaagctgaagtttttgatgtttcgcgccgagcctgacggtgaccttggtcgcctttgaatgtctgaaaacgttggaaagcgcctcctgcacgatgcggaacagatggtcttcaacgccttttgacacacccgtatcgctgatgtcccactcaatatccagcggctgcttcgctttgaactcttttaacagctcaatcagcccttcttttaagccttttccttctaaagtgacgggccgcaaatgcaatagcagcgctctcatctcgttttgcgcttcccccgccatatgttcaaccatgcgaatccgtttgacgattttgtcatccgcatctttcacctgctctaagacggcggatgtcatcatagaaatggcaaagagctgctggctgacggcatcgtgcagatcgcgcgccagccgctggcgttcttcagtgatgactgattttttcatttgatcttgccattccgcccgctcgttggagagcttttgcagcgatgtgacctggagctcgacccgcttggccatttcgttgagctggtctgccgccagaccgatttcatcatcgccgagcggcggcacccgataagcaaaattgccgttttcaaatttcaaaaccgcttcaatcagtgtatccattcttgttttcaggcggccgccatatacataaccggaaatcaaccccgccgaaagagacgccagaagcaggatgaccacaaacggaataccgaaccagccggaagaaaacagcagcatcgggtcaagcccgtaatacagcagcatcagcgtaataaacaccgcgcaaaggagcagactgagtcccgcggtcatccgcatggcgcgccactgaatattggcgagtaattttttcctcataaatacttcacatccacatcgccgatgaataacgaaattgaaattttaatccgccgcggcgagtcgccgtactcagacgatactttatacagattcgggctcatgccgcttttcttagagccgagcaggttcatatcgccgataaaagccgatgaactgacggacacttcgacatccggcgggacgtacacatcgacattgccgatgacaccgctgatggtcatcgtgctttctccttcgggaatcatcgcttttgacaaatcaattttcacatcgccgatgaatccggaaacatttaaatcattcagctcaaacgggtccttcatcatccggagctcgccgataaaaaagctgcggaggtccggctgtctgctttccgtctgggcggaaggctttggctgctcttctttttcaagattgattttcttctctttatgttcatacacgcgctttcctttcaggagcctgtagcccgcgtatatgagaaaggcggcgaaggcatagccgaacaggttaaaggtggcgctgaacaggttcctcaaaaataaaaaagcggcaaagatatacaggacggagccgagccagccgcgggaatatttattaaaaatataacctgtaatcagaaaaaagagcggccaaaacaagaagtcgccgatgccgataatacgcaaaaacatgctgacgcctaataaggcgatgataagtccgagaatctgtttttttgccatcagctgcttgcccctcctttccttgactattgcagtgcaatattgccgctcgtcacttttatatcaatcggcctggcgccgctgcctttcatgccggtaaatgccccgccttccttactcgttttctcaaaggaataagacggccggatccttccgcttgccgtctcggcgttcaccgtaaaacttccgtctttcggcaggctgatcgctgcgctgccgctcgcaagcctgacggatacgggagcatccgccgtctcaagcgaggcgtcgacactgccggaagcgacccgcacgtcaagggcgcccgccacatgttgaagcccgacatgtcccgaggataagcggacagcccccgtttttgccgcaaggcctgctgctgtgagattgcccgacagccccttcgcttcaaacacatccgtcttcacgtgcttcagcgacatgttcccgcttacagaacggacgacgaggtgcgcaagagacagccccttgtttccgtcaacggcaatgctgccgcttgatgtatggacggtgatgtcccgatgataatcatacggaatgcggacaatcagcagaggacgctgaaagagattcagaaattggaaccctttctccttcgctttaagattgagggtctttcccctgctttggacaaacattttccccgccggtcccgtcatgtttgccgcgatatcattccgcgcttccgcgatgatttttacatccgtctgttccgatgaaaccgacaggctgttgacggcacgcggcggtatgcttgccgattccgcttctgtttcgtacagcggaaaaaaacgcccggcaaacacttctttcaccaaaaacagacagcagatcagaacggacgccgccatcagtcctttggcaatcttacgcttcattacgttccatcctttttcattcattttattataaaggaaaagccggagaattgatacgtgcgtatagggaagaggcgtaaacgcgccgatcttcccttgtgcacattattcatgagccgctttttgacgctctgttttttccagagaaagcgagcgcattttttcaatctcagcttccacctcgtctgaatattgggagcggctgtattctgtgttcgcctcagctgaagtgccgtatttgacgcggacttccatttcttcaatgcggctttccattcgaaggaactctctgtaggcgctttcgctgtcaattttgtcgaaagaagcgttcatatgttccttcgcatttgccgcgttcgcgcgggcgatgagcgcctgttttttatcctttacgtcgcgaaggcgcgtttctaaagtttccagctgctctttcagctctgccagctgtgttttcgcctgctcatacgctttttcatgttcggccgcttttccctcaaggtatttcatttcagtcagcgcctttttcgccagctcctcttccccggcgtcaaaagcaagctgagcctggtttttccgttttgccgccgtttcggaggcgtcttcctgttttttcttaaactgatggacaatcgtgtgctgtttgacaattgtttgtttcgccttagcgatgtcactttccatatcacgcacatattgattcagcatgactttcggattttctaatttatcaagcccttcgttaacagatgcgacgaacatatttcttattctttttaagaccattttgtcttcctccttattttttcttcagaaattcttcccattcagagtcaaatccggattgatagcccggtgatgccgcttccggttcatactggcgggaagcggtgtctgagccgccctgcttcatcatcttccacccgaaatacaccatggcgccggccagtccgatcgcaacgataaatggaagagaaccgacgagaatcatagctccgatgacgcccgcgatgatacccgataccgcccggccttttgaaaaacgtttgattccccagtaaagcatcaggcctccgatcgccagcgggatgataaatgcgaaatggcctcctccgaaaaagacagaaagtccgaacacaatcagcagaaagccgcctgccgttttgccatttatattcatgcagatcctcctttcgttttccttgtctttactataaacaaatcccgcggccggcaaaacgagtcagagattgattttcatatcagaccggagtcgtataagcccccggaccttcgcataaaaaaacgccgctgcaccggacggcgcagggcgtttcacgaaaaatctatattctgatgctcgcttctttttccctgatgagatctgaacgttcggctttggccagcttcgtaaagaacaatattccgagaccggacaggacttcaacgagaccgccggcggcaatgacttttccgggaccgaaggcgttagccgcgtatccgcaaagaaccgcgccgagcggaatggatatgtttgagatcatatggatgacggcatagacttgcggctggtcatcatggtccacagacgtctgaataatcgtatattccggcacattaatagcgctgacggcagatccgaacgcaaacgcggcgaggaagacgagcggcagaaaagtgttgaggccggtgatgaaaaatgcagctccttctatgattcccgctgacacaaacaggagaccgtatttgttcaccttcaccttagccaaaataaaacccattaaaaaggctccgcccgtgcctgtcgctttcaaaagcgagtagatgatcggcggcatgtttaaatcttcggcgacataaacggcagagagcgcctcccacggagcggccgcaaaattcatgaagatacaatagatggcgagcgggtataaaatctggtgtttcctgacaagaacgaaaccccgtttgagccttccgaaatacgtcccgcgctgtctgacggcgactggatcctgtttggcatgctggacttggtatgacataaaaagtacgagaaaacctgatagaagatagaatataagagcgataaacaaagaataagcgggactgataaatgttaagaacaccccgctcagcgtaatggcggcaagcctgacgatctggcctgatgactggatgaccgcattcgctttctgcaggctgctttctccgacaatattggggattaatgagatagatgcaggattataagcggctcccgtggctgaatgcacaatcatgagaagcatgacaaaccataaaggagaaaaaccgttaaagtaacagaccggaatgatcaacacgaccgccgcgcgcgtcaggtcggagaaatacatccagaatttcagcgtatgctgcttcataaaaggcccggtaatcggcgccagcatcgcctccggaaggaacgtgaccgcaatgagcagggacgtgccgatcgcgccttccccgtcaaaaatcaaaaaccatagaatggaattaaaggcaaaaccgtcgcctgacaatttaaccagccttgagataaacagaagggtgaaatttttattccagatgctctcgctcttattatatgtatccatctatcaaatcccccattattttacaatgtttcttataatatctcattttttaatttttcagtcaataatgcataagatacattttcctcttgtcaataaaggttcaattgatggatatcttataaaaaaacagccggcttgcagctgccggctgaacaaaacgttattcatcatcacggaataccgcggcgcttctttcatattctatatcctgaacgccttgtcttgcgttgaccgctcttgccgccgcgaaaaaataatcagacaggcggttcaagtaacgcatcaccgtatcatttatctcttctgttttgccgagtttgacgacgagacgctcagcccgtctcgtgacggtccgcgcgatgtgaagctgagcagccgccttatgcccgcccggaagaataaatttctcaagcgggggcgcttcagccgtgtaacggtctatgcagtcttccaatgcggaaatagatgtctctcttaatgtatagcttctatgttcagtgaccgtcgccaagtcgccgccgcagtcaaacagctcatgctgaatgtttcggagttcggctttcacatcaccgcaattctcacaatcatcaagctccgcaagcgcaagcccgataaagctgttcagctcatcaatcgtcccgtagctttcaacccgcagactgtctttatccgttctgccgccgatcaggcttgtctgtcctttatcgccggttttcgtatacagcttcatcgttgtattcctccttcttccgccgcttttacacatgccgcggttcctcttctgacggctctttccgcgtgagggacgtctattgcctctcctgtctgcaaggcacaaatgacaatgtcgccttttgcctgtctgccggaaagagcctgcattctcgcttcagccgctgccgttaacagccgtacaaatccctgttccgataaacgtccgctgatcagcacccaaacggtaagctgcgcagtcacggcaattgtgaccgaatcaaacgtacggcagatcaaaccagcggccgctgagctggaaagccggcagctccacgaaaagcccgggccgtcagatgcggttgacaacattctgaacggccgttctgtatgaagcgttacggtatttccgcttttgtttatcagagaggtgaacggaacgttgacaggctctctttcctcccgcgcttccggcatgaaagcgatcagcggtttcggcgacgatagctgagcaacagcgctgacggtgatgccgtaaatgtcttcaatcgtctcttttttcaaagcctgatccggcgtctgcttcggaaaagcgcgtccgtctttcatcatcaggagctgatcacaatattggcctgcggcatttaggtcgtgaaaaatactgatgaccgtcaggcctctttctctcgtcagccgcttcaccgtatcaagcaggtctttttgatatttgagatcaagaaaggtcgtcggctcatccagacacagcacctcaggctgctgagccagcgcctgcgccagaaagacgcgctgccgctccccgccgctcagattgcggacggattgctgcgcatatcggtcgatgcccgtcatttccatcgcttcccggacaatgtcttcgtcatgttgatccatctgtctgaagagtcctttttgatacgggtatctgccgaaagacactgtttccttaacggtaaatgtaaaagcttgctccgtatgctgcggcaaaacggccatgattttcgcaagttcccgcggcttgtacccgccgacgggcctgcctgcgacgagcgcctcgccttttgacggagagagcattcccgtcaacaatttcaacagcgttgtttttcccgagccgttcggaccgagtatgccgacaaattcaccttttccggcggtaaagctgacatcttccacaatcatccggcctccgtacccgccggacaggctgctcaccctgatcataagcgtttccctccatgatgctggcgaagcagaatcaaggcaaacacaggcgctcccgccaaagccgtcataatgccgatcggcaattcgacaggctcaatgacggtgcgggaaaacaaatccgccaaaatgagaaacccggcgcccgtcaatgctgacagcggcagtaaatggcgatgatccgttccccataaaagccgtgtcacgtggggaatgacaaggccgacaaatccgatcgtccccgagacggcaaccgctcctcccgtcagcagagatccggcggcgatcatcagccattttctttttcccgtactgacgcctaacagccttgccttttcttctccataagtcataatgtttaattctctgccattgataagcagaagcgccgtcccggccagaaaaaaaggcagaaacagcgcgacatagccccagcccctcattgacacgcttcctaacagccagcggacaatcgggagcagatcattgcccgttaaagcgatcacaagcgatatgagagccccgagaaaagaattcatgatgatgcctgtcaaaatgagcgtcgaaaccgacatcgacgcatgaacgaggcggctgaaaaacagaaccgccgccatgaccgcaatcgctgcggcaatgctgacaaccggtagtgtgaaccggccgatgacgggaatctgaatgccgaaaaacaaggtgataacggctcccgccgaggctcccgaagataccccgagtgtataagggtcggcgagcggatttttcagaagtccctgaaacgccgctcccgcaatggataacgcggctccgacaagggcagccagaacgactctcggcaggcggatattcatcataatatttacattcataggatcagccgaggatgtccggccgatcccgatccaaaaaacgtcggataaaggaatatgcagactgccgattgaaatgccgagtgccgtacaaacggctaaaaacagcaggctgaccgtgtaggccagcgggcggttactttttaaacgtttcaggataaacgctttctgcaagcttctcgacccctttgacaaggcgcgggcctgagcgtgtgacaaggtcgggatcaacagaatagacattgtggtgtttgactgcattgacggcaccccagccggcgcgtttttccacttcagcggcctttacgccgtctgtcgtaatgatgacgtccggattcattttgacaatcgcttcatccgtcagctgaacccagccggtctggctgccggcggcgtttttcgcgtgtatatcttcaagcatttcgttcataaacgtgcctttccccgtcgtgtagccgtcaggagacacttcgacgaatactttcttttcgtctttttcagaaatggccgccgctttcttttctatgccggaaaggtcggatttcatcgatttgatcagcttatccgcctgcttttctttgccggccgctttcccgatcatgctgatagatttgtacacgtcttggaacgattgcgcatcattgaccgttaagacggtgatgcccgcatctttcagttgcttcatcgcatcggcggaagcggacatagaggacgcgtgggcaagcacgagatccggcttcagcgcgatgactttttcagcgttcacattcatatctccgactttcggtttttttaccgcttctttcggatatgtatcatttgtcgtgacgcctgcgaccttatctcccagtccgagcgcgtatgtaatttccgtattgctcggcatgagggaaacgattttttccggtgcctgctttatggttactttttcgttcgcggcatccttaatggttaccgggaatgcttcggttgagacggctttttgtttggccgcgcttccttcttcctgtgcgccggaacagccggcgatcacaagggcggtgaccaagagcgccgcccagacggcagtgatcttcttcattcttttaactccccctgattatggtaaacgattgtctctttgacattcgtatccttttttcgcagtaattatactataagtctttaaggcttgtatatccggcctttttgcatgaaagcaaattgttcgtacacactaaaattcatcatgtatactgttacacaatggtgtgaaaaggaggattattatggaattacagcttgaacgaaagctcgtgttgattacaggatcaacctcaggcatcggaaaagctgcggcaaaaagctttttagccgaaggcgccgaggtgattataaacggaagaaaaaaagaaactgtggaacagacggttgaggagctttccgcttatggaacggttcacggcatcactgcggatttatcgcgtcaggatgaggcggatgacttgataaagcgcgccggcggaatcggggaagtcgatattctcgtcaataatctcggtttttttgaagtaaaagacttcgctgaggtgtctgatgacgaatggactcggtattttgaagtgaatgttatgagcgccgtgcgcctgtgccggcgttttctgccgcaaatgctcgagagaaacagcggacggattctgaacatctccagtgaagccggtgtcaaaccgcttgcgcaaatgattccgtattcaatgacgaaaacggcgttaatcagcttgtcccggggaatggcggaaatgacgaaaggcacaaatgtcacggtcaactccgtgctgccgggaccgacatggaccgaaggcgtcgcttcttacatggaaggagccgcaaaggctgccggagaagacacaaacagcttcgtccgggattattttaaagtgaatgaaccgacatcattgattcagcgctatgcaaccccggaagaagtcgccaatacgattgtatttctcgcttcatcagcggcttctgccattaatggcaccgcacagcgggttgaaggcggcatcatccgctccatttaacacaaaaaagcccggcacaatggggacttccccatatgccagggctttttttacatcatgcctgcaaacggaaccggctcccagccgcccgtctcaagctctgctgaaaacaggccgcccgcatgcggctgctcaagtctttcggtttccgtcaatttttccgtcgcggtcgtaatgtataacgtgttcaagtctctgcctccgaacgcgcagcaggtgacgtatttcgccggaacttcgatagatgcaatttccttatgcaaaaacgggtcaatccggacggcacggccgcctccgaacagagccacccacagcattccgtcacggtcaatggtcattccgtcgggagatccttgcgactttggaaagcggtagaccgttttcggatctgatacggctccggtttcaggatcgtatgcataacagacgatttcctgcgtcggagtgtcgatatagtacatcaagtttcggtcccgatcccaatccaaaccgttcgaggtggagacctggtcttttattttggcaaggctgccgtccgtattcagacggtacagcgaagcctcctcttctttgccttccatgctcgtcgttcccgcccataatctgccggacgggtcgcattttgcgtcattgaaacggatatcttcccgcatgtctctcggctgcttcatcttcgtcaatgtatcttcccgaagattgtacaggtaaaaaccgtctttcatcgtcatcaccagctcttcctttgaatacaaggccagagccgtgacaaatgatttgaatttaacggaacggttgattccgtcagccggagtgaagatatgcagctggctgcccagtatatccacccagtacaggcattgcttgtccttgtcccataaagggccttctccgataactgctctcgtatctgctcgtaatgctgcttccatgtgtgaacacctcttttgcttgtcagtcttctattgttattcccgacaaagcggcgtccaaactcaatcttttttaaaaagaatcgtaatcaccgttccggcgctgattctgctgttgacatggatggttccgttatgaaggtgtaccagctccttggcaatggcgagcccgagtcccgttccttctgacggtcccttcgtattcgttccccgataataacggttaaacagctggtgaatcgtttcatcgtccattcctcttccgttatctttcaccttcagaatgagctgttcggctgattcctcaagcacgacccgaatggcggtccctttcttattatgcttaaccgcgtttgccagcagattctccagaatacggcggaaccacgcttcatcaatggcgaaaagaatgtcttcctttttggtttcaaaggcgatgtcatagccttccgagaacgtgtttttcgtgaaatcgttcgtgacgtttctgataaacggcacgacgttgatcagccgccgttcgatcgggagggccgcgtttttgagacggtatgttaagtttaagtcctcaatcagcttggacatatattctgatttttcccggacgatctgccccatttctttgacttcttccggggtccagtcgtattgcttcgattcaagcatcatgctgtagccgtaaatcgtgctcagcggggtttttaagtcatggctcagcccggcgatccattcttcccttgtcgcctggattttttctctgtttttcttatcccgcttcagcgtgtcggtcagctgatccatcgattcgaaaatctcggcgaaaaagcggaacggctgctttgttttgccttttttgtttttgctgaccggctgtcctttgcggttcttcggctcttcaagccggccctttgataaattgacgagccatttgatggtatgaaacagcggccagccgaaacggaaagagtaccagatggtcaggatgcagatcataaatactaagattccgatcaagaggaagagggttttcatcacatttctcaaaaatgatttgttaaactcgtgatcggggatgtacacggggttcggcaccgacgcgaccatccatttcgttttatcgagtcttttaaaagaaatttcccgtttgtaattccacggcttggaactgtatttcagcaattcaagctcattgacggtgttccgttcttttttcgtgctgttgatatccccgagcagtctgccgctgtcttcgagaaggtagaccgcccctttttcccgtttaatataatcaaccgtgctctttttatattgagaaagggaagcgagggatggctcctgtgattcgatgtaagtgagaagctgctcactggcggatttccagccgaacagaatcaaataggtctcatcatttatcgtgaccgtccagtaattcagcttgtagttgtcaaaattccggtactggtaaatggataagagatcttttctgctgtaatggctcgggacgtctttcggcactctgtacgcgtagtccgttttttcattatcattaatgatctgcagccagcccttctgctttcggaccgacatctttaaaaactcatcgacgtcccatgtgccgtcttcatttttatcaagccacgcttcaaacgagtctgccgtcgctttggtcagtcccgcattggcttccgcttcgctgaaacgccaatccaaatagaagaaagaagcgacggccaaaacggacatcagcaggatgacaagcagcagctgtccgaaaaagtggagcagaaattttccgcgcattctcatgagcgggttcctttttctccttgatcgggaataaaccgataaccgaggccgcgcaccgttacaatataagacggattgctggggtctttttcaattttttctctgagcttgcggatatgcaccatgacggtgttgttgtcgccgtaagacggatatccccatactttttcatagatctgatcttttgagagcaccacatcagggtgttcacagaaatattgaagcaattgcagaagctgtgcggagcagctgacgggctcgcccccgacgatcagctcggcgttttgcggtgaataggaaaaatggctgtatgaatacgtctttaccgccgttttctcttcgcgcttataggttctctttaacgtcgctctgatccgcgccgccaattcgagcggattaaacggctttgttatataatcgtcagctcccaatgcaaatcctgacagcttatccgcatcagaagaacgggcggtcagaaaaaagatcggagcgtcggtatagttccggatttcggtgcatgcttcaaaaccggacatgccttccatcatcacatccagcacgagcagatccgcggtttcatgtttaacaaactcgatcgcttcctcagcgcttccggctgtcttaatgttgtgatagccttctttgacgagaacgcgtttgaccatatcaacgatcgccttctcatcgtctacaattaaaattgacgcattttccaccttggacgttcctttctctttgtttttttcatcatatcattatatggataagatttggtacttttttagtgcggaggtcttgcggggaaacagaaaagaaaaacgagaccggacatctcttctcgtttttctcatgttgtcagagcggaatatccatcattccgccgcttttgtcaggagctttcatttataagatgaagaataaattcccaaaaacccggcacttcctggcataacagcatgtccgctttttcaactattttaatcttcaattcttgttcaagatcttctctttcctggtatgatgtattgctcagttttttttttatcattggcgaaaaacgcgaaatcaaaagttccatttcgtcggtatctgtgttctctttgttgaagtcaaatggcccgttcactgcttattttccccctttttttgcttgtccagctgctttctgagattgtcgagcccttttttatgaatattggaaatgttctgccgtgattcacccagcgactcggcaatctccttcatcgtcgctccgtgaagataaatattcgtcagcacgcttttttgtttatcggttaacgtctgaagcgcttcgtataaatcacggttttggacatgctggctcaaatccccctgcttccgcagaaactcttcatacgcgtcttttcccatttcatagggaagcgcttcacctccctccggctgatccaccgtcagcggatagcgcttctgatttttacggatgcgcttgtcaaaatcgatggagaaaatccggatcatagagttcatatatttgatgatccggatttccttataaaactgtttaaaatggtcgtccagtgattttgcatccttctcgtctgaatgttccagcacatttttaaatttctcgtaatgctttgggtcacttaaaaaatgtttaacgatcggatgtttcataatttccttgcattttgaccgtaaaagaacttgatagtccataaaaccgccccctatttaaattaaatgaaagaaagcaaaaaaaagtaaactactcctttccgactaagattccgcactccttatgtcccggttttgccggaacaaaaaaaagaccctcaactgcgatatcaggtttacaggagccgctctttctttcacttatatacatgactgcaggtcaagtcaggaggtggctgataatggatcaggtttttatagaagaagcggtcagacagatcggcaatctcggctttccggctctgattgccatgtatcttctcacacggtttgagaagaagtttgacgccctgatcgaactgatgacggaactgaaagatcaaaaaatgaaaaattaattttcacacgaagttgacttttcaccggaacgcatcacttaacaaagcagaagggaaaacgaaaggcctttcacattctctttctgaaaaaacaaagcttgagaggagacgatttacatgtcaaaagaaaacaactgcaatatcccgcagccgatcagaggagacaaaggggcgaccgtcacgattccgcgcaaccttgaaagagaccgccaaaatccggatatgctgacgccgccggaaacggatcacggcacagtggataatatgaaattctctttctcagatgtgcacaaccggctggaaaagggcggatacgcgcgtgaggtgaccgttcgcgagctgccgatttctgaaaatctggcatctgtcaacatgcgtttaaaaccgggcgccatccgtgagctgcactggcataaagaagcggaatgggcatatatgctgacgggcaaagcgcgggtcacgattgttgatgaacagggacgcagttttatcgatgacgtgaaggaaggagatctgtggtacttcccgtcaggcctgccgcactccattcaggcgctgaaagaaggctgtgaattcctcttggtttttgatgacggttctttctcagaaaacagcacattccaagtgactgactggcttgcccacacaccgcttgatgtcatcgccagcaacttcggggtttcagaaaaagacctcgccggcctgcccgggaaagaaaaatatatctttgaagagccggttcccgggaagctgaaagatgacattgtggaaggcccgaacggtgaagtgccttatccgttcacttaccgcctgctggatgaaggcccgactgctgagacggatggcggcaaagtatatatcgcggattccacaaacttcaaagtgtccaaaacgatcgcttcagcgcttgtcgtggtcgaaccgggcgcaatgagagagctgcactggcatccgaacacgcatgaatggcagtattatatttccggtaaagggcggatgacggtttttgcatcagacggccatgcaagaacatttaactatcaggccggggatgtcggttacgttccgttcgcaatgggccactatgtggagaatttgggagatgagccgctcgtcttcctggaaatcttcaaggatgaccactatgccgatgtgtccctgaaccaatggcttgccatgcttcctgagaaattcgtccagcagcatctggatctgggcaaagactttacggatattctttcgaaagagaaacaccctgtcgtcaaaaagaaatgctgaagaagatacacaccggcttgcagagttccgtctctgcaagtctcctctgtgtgaaaaggagctgaacagatgatcaatcaaaacgggacgaaaatgtttattcttcaggtgctccggtatgccctggcagccgctgccgtattattcgggtattttatcgtgatgatggccgtattttcattagccgggacgagctacggatcgatggcgtacgtcctgcttttttccgtgctttttatttttctcggtttatgttttgaaccgcttgagcggctgatgatacatagctttaccttttttgggacgggcaggctgccttttctccttttagccagcaccgttcagctgctgttcctctggatgaccgcgtatacgaccgataaactgattgaaaagatttggctgtcaacgacggaggagctgattgtggcgggggtttttttcgttttggataaatgcgtctccggagaaaagcagccccgggcgcaataaaaaaacgcaggccggaatggctctgcgttttttttcatcataccgttgcgttttcatgccggattaaatcgtaggttaagcagaccggtttgttcgtgcgcggatcttttacaatctgtgcgtcaatttggaaaacgtctttcaatatgccgggagtcatgacttcctccgccgttccttccttgatgacgcgcccttttttcagggcgatcatgtaatgggaaaaacgggcggcatggttcagatcatgaatgaccattaaaatggtacggccctgctccttgtttaatttgtcgagcaactgcaaaatttcaagctgatgggcgagatctaaataagtggtcggttcatcaagaagcagcagctccgtttcttgagcgagcgccatggcgatccacacacgctgccgctgccccccggaaagcgcttcgatcggccggtcgtaaaattcggccatccccgtctcttccagcgcccatttgatcatgtcacggtctttatcactcaaacggcccattccggactgatgcggaaacctgccgtaagaaacaagttcgtacaccgtcagcccgctcggcgcttcaggcgtctgcggaagaattgccatttccttggcgatgtctttcgtggatttttgcatgatcgcctgtccatttaaatagacggcgccggatttcggtttcatgattcttgacatcgttttgagaaccgtcgattttccgcagccgttcggaccgatcagtgttgtaatttttcctttcgggatggcgatatccaattctttcgctatcaaacggtcgccataaccgacagtaagctgttccgccgataatgagttcatcgcggcagtctccttcctctatttcgttttcatcagcaaatatacaaaatacggcgctccgagcacggaaatcaccaggccgacgggaacttcggacggtgcaagcacatttctcgccagcgtatcggcaagcagaaataaaaatgctccgattaaagccgaaaccgggataagcgtctggtggcgcggtccggtaagccttctggccaaatgcggcgcaatgagtccgagaaaagcgattccgccggctgccgcaacacatgacgcggtcagggcaacggcgcacatcagcagaacgcgccgctccttttcaacccgggtgccgagccccgccgccagctgatcaccgagctgaagcacatttaaatacctggctttatagaggctgaacggtaaaagaaccagcagccacggcaaaatggacagcaccattttccaattggcgttccaaatcgaaccggaaatccatacaagcgcctgcatgaaatcccgcgggtccattttcagctgaaaaatcaagagaagcgcattaaaccccgcattgacgccgatcccgaccaaaacgagccggacaggtgaaacgccttttttccaagccatcacatagatgagcagcgcagccagaaaagcccccgccaaagcgctcaccggaagcagccatgtaccggccatgcttaaatcaacagctgatccttggaaaaagaagataaacagaacgaccgccaaagacgccccggcgttaatcccgagaatgcccggctccgccaagtcattttgagacacgctttgaaaaatcgcgcctgaaaccgcgattccggcgccgaccagcaatgacagcaccatgcgcggcagtctgaattcaaataaaacgagctgatcccgggcatccccctgtccgaaaaagacacgcagcgtatcaagaggcgcaatccggatcacacccatgtttaagctgataaaaaagacgatgcatatgagcaaaaacgtaacggccatgaccgccagcggttttttcgattttacattcattacagccctctcctttccctgcgcgccaaataaaagaaaaagggaacgccgataagggcggttaaagcgccgaccggtgtttcaaacggcgcattgacgagtcttgcggcaatatcactgaagactaacagaacggcgccgaataccgccgaacagggaatgatccacctgtaatctaccccgactaaaaatcgggtgatatgcggaatcaccaagccgataaaagaaatggctccggcgactgagactgaagcccccgtcaagaggacaacgacaaacattccgattactttcacaagcgatgtgtactgcccgagccctttggccagctcctcacccaagctcagcaccgtcactgagcgcgcaatcagaaatgccagcaaaagtccgataaccccgaccgccaacagcagctgcacgccttcccatttcacggaagcgactcctccggcataccagaacttcacatcctgggcgacatcaaaacggatcgcaatcgcgcttgaaagccccgttaagaaatagccgactgccgtaccggccagcgcgagcttcaccggtgtcagaccgccttttggaaacaggccgatgccaaacacaataagcgctccgattcccgctcccgcaaaggaccacaaaacaagcccagcggcagagagccccggaaaaaaagcaaacgccaatgcgatcgcaaatcctgaccccgacgtcacgcccataatggaaggctcagcaagcgggttccgcgtcagcccctgcataatcgccccggacacagctaaaaaagccccgacgagcgcggcggcagcggttctcggcagcctcagatcgcgtatgatttgatgagatgtattttgcggctgaaagtgaaagagagcatcccacaccgtccgcagatgaatatcggcagctccgatggaaacagacagagccgcgccgatcaataaaaccgcaatcccggcacacagcagcacagccgcccggaatgaacgcgccgtccactggatttcactccctgatgccccttgagccgtcattgtctgtttctttttcaatagacccaacactcgttcttcctttctcaaaacaagaatggtaatgataatgattatcaatgacttgtttcagtatagcacttttatcttctcttttaatagacctaatttcatataaaaaaagaaagtttttcttaaaaaagagcgtgcttctctatgaaagcagtgatataatcacactgataatgattctctttatcactaatttttatgaaagaaggaatgtcagatgttccatacatacaagaaaatcggcgcagcgctgattgccatgctgctcatcgccgctttggccgcatgcggcaattcttcagacacgaaaggttcttctgaaaaagaagaaaccatcacgtataaagccgaaaacggcaatattaaaattccgaagcacccgaaacgggtcgtcgtcatggctgacggctactacggcgactttaaacagctcggcatcaatgttgtcggcgcgccgcaaaacgtatttaaaaacccttattacaaagggaaaacaaaaggtgtgacaaacatcggcgacggcacgtccgttgaaaaaatcattgacttaaagccggatttaatcgtggtctggacgacacaaggcgccgatattgaaaaactggaaaaaatcgcaccgaccatcgccattaaatatgacaagctcagcaacattgatcaattcaaagagtttgcgaaaatgacaggcactgaagataaagcagacaaatggctggctgaatgggataagaaaaccgctgccgctaaaacaaaggttcaaaaagcggtcggctcaaaaaccatctccatcatgcagacaaacggaaaagacatctatgtattcggtaaagacttcggccgcggcggaagcatcatttatgacaaactcgggctgaaggccacaaaactgacgcaggaaaaagccattaatcaagggccgggctacgccagcatttcactcgagaaactgcctgacttcgcgggagactacatctttatggggccatggcaggccggcggtgacgacaaaggcgtgcttgacagctcaatctggaagaacctcgatgccgtcaaacaaaaccatgtctaccgcattgatccgatcggcttctatttctcagacccgatctcacttgaaggccagctcgactacatcacaaaaagcttaacaaagtaaccccgaagccgctgtcacagcggctttttattatgcttaaaacttgacaaaaaatttatttatgctataatttacatttttggattaacatgtataataagattctcccggccggagattgatgtaaataacggaggatctttatatgaaagaaaacaaggcgagtatgacttccctgctgtccgctttcggaagggcgtaccacagtaaatatggtgaaaatggctgcagcaagcggagaaccgatgttatcgtgtttcagttataaagaaatcgaaaaaatattagaatcatcaggtctgcttatttatgaacatttatctccggcggacgtcaatgaccgttttttcagcggacgcactgaccatttaaccgcattcgagaccattcattatatacacgccgtcaaaacgtaacccgctgccgcaaataaaaaagacatctcacagacgtgagatgtctttttgtcataccgattgtctgttgtttgcaaatttctttgagacgaaaggatataacagcaaaccgacgaagaacagcccgataccgagaataaaggtcgttaaatcggccgttccggtaataatgacataaaaagaataaatgcaggcgaggatggcgatgataccgtctcttactcttgaaccctttatctcgtcatacgtttcacccgtaaaaatgagcttcaggctgtaaaacgctgacacgagatacggaatcagataagcgagcgtcgccgccgtcgttaaaaacgtaaacgcgtcactgatcgtccgggaaataactgaaaagataaagatctgtgacatcacgttcgttacgattaacgacacaaccgggctgccctgtttattcgtttttgcaaaagcagcgggaaagtctcctgatttcgccgcttgatacggaacttcagagccgagaagaatccagccgagcatcgttccgaacagacacaaaatcgccagaatcgccatgatgacacttcccgcattgccgacgatcgcgtacaatacgtcaacaaacggtttttccgagccgacaagcttaccatgcggaagcacgcccatcgtaatcaatgttacgatgatatagatgccaagcgcgatcaataatccggtaatggtggcgcgtttcacgtcgcgctgcgaacgggcgcgcccggataagatgactgccgattcaattccgacgaacgcccataatgttgaaatcgccgcattgtggatctgtccgccgattccctcaactgtgtgaggacctgtttgaaccggaaaataaaaatgatcgaaaaacgacgtttgaaacacaaataaacctgcaatgataaagaagataaatcctaatacttttgaaaacgtcgtgacgaaatttaatttactcgcaccgttaatgctggtgacgagaatcgtgtgagtgccccataataaaaccgtacatacggcaaacgtcagcagctggccgagcgtaaccgcctgaccgccgatcgaaaacatttcacgcttatccgttaaaatcgggaaaaatgatgttaaatatccggcaaggctcgtgatgatcgccacgttgctgatccagctcgccacccagtagccccacaccatcgtgaagcccgctgcattcccttttttccgatcgctgaacagcgcacgcgcatagctttgcggccccgccgtcagctcaggcttgcggatggataagtggccgaagaccagcgcgatcattaacacaccggctcccgttaaaagccatgccgatgtggcgccgaacgggctcgcgatttttgcgagcgaactcggaagcgaaaagatgcccgagcctaccatatttcctacgacaaacgccgttaataaccaaaaaccccattttttcgtctgttccattcctgtacctcctggttgttcattcgtacggaccagaccccgagatcatatttacacgcaaaaaaagcctgaacaaaagtccatgcttaaagaaacacacacacccttgatctccggatagccctccgcgaaaaagcacgcggcagtcctgcacttattcagatacagtcccagcataaagaaggatcggctttctttacacttcggcgctgatgcctttaacacatgttttgcggcccctatcagcctggcatgtgcgactcatcatcaagcgcaacctctacctcaccgagaaagagtgaggatttttatcattcaattctactcagaggttatcagagataaaaagatctgtcaaagggaaaaattagatggaaaacggatagagcgttcgccctacccgtcttatatggtcagcggttgttttttttcttttgaacagcttcttgaagcggatcgtctttcagagctgcaccggcgtcttcaagcgcgccttgaatgacgtttttgtttttatcgctgttttttcctttttctttgttaaagaaagccatctgtatcacctctttatcaaatataggtacacctataatgtgtctttttccgcggcagaatatgcggaatccccgtctccttccttttggcggaacaggtaaagtttgttgatcaaacatgcattctcttgatatatttgtaattcaggggattttggcaaaaataaaaaggagaagcgaaaaatgacaggaaaaacacacatcatgggaggcatcgcttcttgttccgcaattgcgtattattacgggtatgatccggtccttatgacctcagcgggtgccctcggggcgctgattcccgacatatgccatacgaaaagcaaaatcggcagaacgctgcccgttctgtccaaaatcgtaagcacggtgttcggccacagaacgtttacacacagcctgctgtttatgcttattatgtttttcattacggcaacttatattccgaatccgagcatttccgccggactgatgatcggaatggcgagtcatcttgtgcttgacgcatggaccgtcaacggcattaaactgctgtttccgtccgccatccgcttccgtcttcccctttatatgagaacggggagtttttcggagcagcttgtgctggccggcttaacgattgtatcctgctattatttatacgaactggttcacggccgtatctcttaaacaaaaagcatctttcgcttttagggtgaggagtcatacatatgaagaaaacctttttcagcaatcatcggtttttatgcctgtccatcctgttcatgtggatgaaaacctatgccgtttataagctcggttttgatctgcagaacaactcggttcttgaggaatgtctgcttctcattaatccgctgagcttcattgtgccgctgttcggcattgccctcttgctgacagaaaaaaaacagcggatctttctgctttcggcaaatgtgatgctgacgggaattttaatcgcgaatacggtgttttacgggttttatattgattttatcaccataccggttttgtttcaggcgagcaatatgggcgatatgggaagcagcgtccaagagctgtttcacccgctttatatcgctttatttttggatattgcggttttgttttaccttggtaaaaggcataaagccgataaagggaaagccagcacccgtaccgttaaagcgtatgcgtgggcatcagccggcctcatgctgtgcaaccttgcactgtctgaggccgagcagccgaagctgttcaagcacccttttgatcgtgaagcgctcgtaaaaggaatcggcctgttccactttcatttgtatgacaccatttcgcagacgctgaatgcaggggcaaaagcgtttgccgatgaagacagccttgcggcggtcgcgaattacactcaagccgactacagcaggccgtccgaatcaaagttcgggctcgcaaaggggcgcaatgtgatttttgttacgctcgaatcaacacagcgttttgtaatggatgagcgggtcaacgggcgggagattaccccgtttttaaataaactgcggaaaaaaagttatgacttcactcatttttatcagcagactgaacagggaaaaacctcagattcagaattcattactgcgaattcgctgtatccgtcttcaagcggcgccgtttttttcacaaaaagcggccaccggttcaatacgatgtaccatatgttaaaagaccgtcaatactattcagccgttctgcatgccaatcataaggccttttggaaccgggatgagatgtacggggcattcggaatcgaccgttttttcgacgcggatgaatttaaggtgacacaggaaaattcaacaggctggggcctgaaggacaaggaatttctcgaacagtcagcggaaaaattaaagaagcttccgcagccgttttacgcgagcctgctgactttgaccaaccattttccttttgaaattgataaacaggatcagctcattgaggaaccggacacaagcagcgagttattaaaccgctatgtgacgacggtccgctatgaagatgaggccctgaaacactttttcaagaagctgaaaaaagaaggactgtatgacaacgcgatgatcgtcctgatgggagatcattacggtatatccgaagcccataatcaaggacttgccgaattcttagggaaagaggaaatcactccgtttgatacggttcagcttcagcgcgtgccgtttatcattcatattcccggggtgaccgaccgtgcgccggaaacgattgcttcggccgcgggacaggttgatgtaagaccgacgctgcttcacctgctcggcattgaaacgaaaggcagcattcagttcggcaatgatctgttttccggagagcggaccccgtttgcggtactgagaaacggcagctttatcacggatgatcatatttatacgaaaaatacgtgttacagccgtaagacgggtgaaccgctttctgacatgagcgcgtgcagcgatgagaaagaaaaagcggaacaagagctgatgctttccgataaaatattaaacggcgacctgctgcggttttataagcaataaaaaaatccctccgttatatggagggatttttcatgtttcatatataagccgtccggtcattttcgtatcatatccggataattgagaaagctgagacttgaattcctcagaattaagaatgtcctgcacgctttgaaaaagctcccggttttgttttaagacgaccacatcgtactgctcactgatcaccgggataaagtccgtgcccgccatatgcgccgcatgctgcgacccgactccgatatccgcctttccgcttgatacttgtgaagccgctgacagatgatccgtgacaatgtcatgatagccggcgacatcagacggcgtaatgccgaaagatctgagctgttcatccagcagcaccctcgcgcctgatcctttttcgcgattgacgatgcggacatcttttcggctcatgtcctgaaaaccctgaatgttcagcggattaccttttttcacatataatccggcctgccgaagcacgacatgaaaaagcgcaaacggctcccctgaaagaatgcgcttcacgtacgggatgttatactgccccgtctccccatcgtataaatgcagactgacgatgtcacaggccccgcggtacatctcgatcagactgttcaaactgccgctgtacttgcggagcggagccgcctgtattgtttgttccagctgtttgctgaggaggtccatcgacacatcctgcccgctgatgataacggactgccttttttccggctcccgcccgcgggacgggtcaggcgcttctgatacggatggcttttttgacattctcatgtttgctttatattgttttaagtcctcttcatcgaccctcatctgtcttccgaccctgtacgccggaatgagtcctttttttatcaaatcatatactgtcagtttggagaccttcaaaaggcccgcaacttcttctattgtataggaagtggcttctgtcatattatcacgctccgtttttattataactgttcagatattgaaaaaaaaccgcaccaccacgtacaattgcgttataattagtttgatctaatgatatttagctataaggggtgcacaatgttgaaaaagaaagcgacactactaacaactgcggctatggccgttttcctcgcaactgcgggctgctcttccggacaatcgtccaaaggcggacaaaacgaaaaagtcacgctgaccgtttctgcggcagccagcgctcaggatgcacttgaagaaatccagaccaactacgaaaaatctcattcaaacgtaaccattcaagacaacttcggatcatcaggcacattgcaaaaacaaatttcacaaggcgcgggagctgatttattcttctcggcagccgaagataaattcgaaaagctcgttcatgacggagatatcgacaaaaaggacagcacggatcttttgaaaaatgatctcgtcatgatcgtacctgagaaaaacagcgcacacctgacacatctgaatgacctgaaaaaagacagcgcggaaaaaatcgcgctcggcacgcctgaatccgttccggccggacaatacgccaaacagtcattgacggcattatccctgtgggacaaggtaaaagataaagtcgtctatgcaaaagacgttcgccaggtgctttcttatgttgaaaccggaaatgtcgatgccgggcttgtctataaaacagacgcgctgatttcgaaaaaggtgaaaatcaccgatgaagcgccggcgaaaacgcacgatccgatcgtttatccgctcggcatcgtcaaggatacaaagcaccgtaaagaagcagaagcgttttgtcagtatctgcagtcagatgaagcgatgaaagtgtttaagaaatatggatttactgccaattaacattacggcttcggaatttttcaccccagtcgcattgtcttttgaggtggctttggcatcaggcatcgccgtcatcattctcgggacgcttgccggcgcctggatggcgaaagcgcgatttcccggaaaaacggctgtggagaccctgtttatgctcccgctcgttcttccgcctaccgttgtcggcttcattctcattattattttcgggaaacacagctttatcggccgggcgattgagcggatttttcaccagcccgtcattttcacgtggtcggccgcggtgatcgcttcggccattgtcgccttcccgcttatgtatcagtccgctaaaacgggcttcgccgcggttgatgctgacatcgagggagcggcgaaagtagacggagccggcaggtggcaggtgttcacccgtatttccgtcccgcttgcctttccctccctcttgaccggaagcattctcagtattgcacgtgcgctaggtgaattcggggcgactttaatgtttgcgggaaatattcccggcgtcacccaaacgctgccgacagcgatttacgtcgcgatggactccggcaatgaaacactcgcctgggtgtgggtgatctgtattgtgatcatttctttcctgatgctgtttttcattcaattgaaaaaacccgcttgaccgatccgccttccgcgcacctttcgccggaaggctttttgatttaaaatcggatggtatataatgaaacaaaaaacacacaaagggtgcggccatgaagattaatgtcattatcgcggatgataattctttcatcagagaaggaatgaaaatcattttgcatacatatgaggaatttactgtatcggcaacattggaaaacggactggaggcggcagagtattgtaaacacaatcccgtcgatatcgccttgctggacgtccgcatgccggtgatgaacggcgtcgaagccgcaaaacggatcgcggaggaaacggatacgaagccgatgatcctgacgacatttgacgacgatgagtatattttagaagcgattaaaaacggcgcgaaaggatatttattaaaaaacaccgaaccggaacggatacgcgatgcgatcaaaagcgttttcaacggacacagcattcttcaggacaccgtgctggataaaataaaagacagccttttccggccggcggaagccgcgcatcagattgatgaaagccagtttactgaaagagagctcagcatcatgtcgcttattgcgaaaggactgtcgaacagggaagtttcaaaacagcttttcatttctgaagggacgacggccaattatatttcatctattttagggaaaacagggcttgagcacagaacgcagatcgcgatttattatatcaccgggaaggtggataacgggcgttgaacggtatggatttttggatgctgatgagcagactgatcgccattttttatacggcttttttgtttgtatcggcagaccgcccttacacaccgtacgccgtcttgtttctgctgctttatctatctttgggcattgcggtctgcatgatcaggcagaccgcttggaggcgcgggatcaccctcatggcgctggcattgaccgcttggctttccgccttaggccatccggcgtttctatttcttttgccgcccgccatttttgcggttcttgccgaatatccggttcaccgctatgtgttctgcctgctcgtgtttttgccgtttttatttatcccgtacggcgaccttccgacttatatcgtcatgacgttgttctgcttggcgatattcgttttggccgcccggtccagcgaccggctgaaaaaatatgaagagcagtcagacaacatgcgctcaagcattgaaaaactgacgaaacagctgcacagcagcacagaatatatcaaacaatcggagtataccggcaaactcgaagaaagaaacagattgtcccaagccatccatgacaaaatcggccattccatgacaggcgcgctcattcagatggaagcggcgaaacggatgctcggctcccatccggacaaagcggctgaactgctccaaaatgccattaccatttccaaagagggcatagaggatatccgtattacgctgaaaaatatgaaaccgcccgctgaacaaatgggcattcacagattaagaacgtttattgatgaattttcggccaaaaacgggatgccggttccgtttacgcatcaaggcgatttggacaggctgacgcaaatgcattggagagtcattcaggaaaacgtaaccgaagccttgaccaatgcaatgaaatacgccgatgccacgcagattttcattgatatccatgtgctgaacaaagccgtgaaagcggaagtgaaagataacggaaacggcgccgtccgctttaaaaaaggcctcggcatgctcggtatggaagaacgggcggccgtcttgcacggaaccgttatttttgacggcacggccggtttttccgtcacgacattgcttccggttgaataagtgaatgttttcatgtgaaaaatatgaagattctcatgtcaaaggaatgaacagctgcactaacggccgttcattcttttttttataataagagcatcataagacatagaggtggaaacatgaacattttggagctcaaacagctgagtaagaaattcggtgattatgccgccgttgaccagatgtcgcttgccgtaaaagaaggtgagattttcgggtttctcggcgcaaacggagccggaaaaagcacgacgatcaatatgatctcaggccttttaaaaccttcaggcggagacattctgtttctcggaaaagatattttcaaatatagcaaagcaacgaaaatgaatatcggcatcgtccctcaggacctcgcgatttacgaagaattaaacgcctatgaaaatgtgaagttcttcgccgggctgtacggcctgagaggggcggctctgaaagaacgggtcgaggaggccctgacattcgtcggcttgagcgataaacacaaatatttgccgaagcatttttccggcggaatgaagcgcaggcttaatattgcgtgcgctcttgcccaccggccgaaactgatcatcatggatgaaccgacggtcggcattgacccgcaatcaagaaattatattctgcaatcagtgaaaaagctgaatgaaatgggctgcacgatcatctacacgagccactacatggaggaagtggaagaaatatgcacgcgcatcgccatcattgaccacggaaaagtcatcgcagaaggcacaaaagaacagctgacctccatcattaccgacacgaaggacgtcgtgattgagctgtcatccggaaacggcatcagcctcggcgatattcaggagctgcccggcgtcagagccgccgcactggaagaaaacagcgtgaaaatcagctctgacacaggggtcaacaatttaaaccgcctgatccggtacttcatggacaaaggaattgaaatccgctccttgcaggaacaggcccctgacttagaaacggtatttctcacgctgacaggcagaagcctgcgcgactgaccccactgaaaggaggattgcaaatgaatattctgcacatcgccgggaaagaaatcaaaatcagttttcgcgacagacggacttttattttcatgcttgcttttccgatcgtcttcatgctgattttcactgcggcattatcaaacgcctttgattcagaggtgacggtcggaaacatcaaggtcgtatatacggaccagtcaaacggccctctttctcatgatttcactgagtttatgaaagccgcaaaaaaagagcatgtctattttcaaaaagcggacacggaggcaaaaggcaaaaacgtggttcgagaaaatcaggcggatgctttcgtcactgtaaaaaacaccggttttcaagtctatacaaatgaccggagcggcataaacggcacgatcgtccaaggcatgctgaccgcttttaccaatcaatacaaagcaggcgccgccgcttacaaggcgcataaggcgccttccgccggacaaatcaaaagcgattatatgaagcagacgtctttacacaaagcgaaagaaccgaaagcgaaagatttttacgcgatatccatgacgacgatgatcgggctgtacgcctcgatttttgcaagcagcttattccgcggggaaagaatacggcacaccgcagatcgcctgatcgccgccccgctccggaaaagcgatatctttctcggaaagatgctcggcattttggctgtgaatgttctgacgattcttgccgttgtcgccttcagcaaatttatcttaaaagcgaattggggcagccacatgggacttgtgcttttgattctcgtttctgaaattcttttggccgtcagcttcggactcagcctgagctatttgaccagaaaacccgaaagcgccagattaatcaccgtcatcatcgttcaggtgatgtccattatcggcggcgcctattacaaatatgaaggcggaggaatttccgccctgtcgcccttatcctggatcaataaggcgattaacagcatcatttacgcaaatgatgtatcagcggcatggcctgcactcggtttaaatacagcattggcggcactctttttgctgatcgccgcatttaaatttcaaagacgggagggactgtaatatgaaaaacttctggtggctgtttgcgcacactctcaaagggattacaaaaagcaaaaaacagctcattctttatatcggggctccgctgatcggcgtcttcctctccttcatgaccaatgccaacggcggagccgaaacgctcaatatcggcattctcgatcaagacggcggagaagtggcgcaggatacggccgcgtttttaaaaggactggatcatgtgaagatttcggaggaaacggctgcgtccgccacatcaaagatcgcttcaggaaaaatggaggcgctcattacgtttgaaaaaggcttctcccaaagcgtaaaagacgggaaaccgtctcacatcggcatgacctcgctgaaaggcgcccaggtcaccggatatgtcagctcttatttgtacaattatatgaacagcatcgcctcaatcggcaaatcctccggcggagacgcaaaggcctttcaggcgatgtacgccgatttcaagcattctcccattcaaacggagtccgctgttttacaagatacatcgaaccataaagaaatgacttactcagtcatcgggtatctcattatcattatgctctattccgcaggcaacctgacggaactaatgattaaagagagagaaaacaggacatactacaggcttctgtcaacgccgatcacatcaaagcagtatgtattggcgaacgcggcggtgaatatcattatcatggccgtccaaattctattcgccgttctctttatgggcgccgcttttcatattcatacgtcattcccgctgtggcagctgttcgtcctgatgatgctgtttgcattaagcgcgatcggggtcgcctttattgccgtcggtttttccaatagcagcgcttcggcatcggcgcttttgaatttgatcgtcgtgccgacatgcttgctggccggctgcttctttccgggcaatattatgccgaaaacggtgcagacaatcgccgaatttctgcctcagcgctgggtgctcgatacggtcgatcaattgcagcaaggccgcacgttccaaagcctgatgctgaacatcatcattttgggagccttcgccgccgccctgttattaatagccgcatacaggttcagcgtaaaacgtcagacacagacatttatgtaaagaaaaacagccccgtaaagggctgttttttcttagaacagaagctcgtccggattcgggccgacacgctcgtctttgttcaatgcgctgatcttttccatttcttcctgtgacagttcgaaatcaaaaatatcggcattttctatgatgcggtgctctttaatcgatttcggaatggtaacgacttcgttctgaagatcccagcgcaaaatcacttgagcaaccgatttgttatgtttttccgcaatttgtgacagcacttcgttatcgagaagctgtccctgcatcaatggagaccaagcttccacttgaatgccctgcgctttgcagaaatctcttacttctttttgagtcaggcgcgggtggaattcaatctggttgaccatcggcttgatttcagcatctttcagcagttcttctaaatgatgcacttggaagttgctgacgccgatggcgcggattttgccgtctttgtacagcttttcaagagcgcgccatgtgtctttatatttatccttgcccggccagtgaatcaggtaaaggtcgaggtaatcgaggccgaggcgctcaaggcttttctcaaacgcgtcaagtgtcgtttcgtatccttgatcttcattccacacttttgacgtgatgaacagctcttctctggcaacgcccgcagctctgatgccttcgccgacaccctcttcatttttgtaaatagccgccgtatcaatgctgcggtagccgtttctgattgccgcttcgacggagtccgccgctacgcttccgttttccaccttgaagacgccaaggccgaaccacggcatttcaacgccattatgaagctttacagtatcttttaagctttttgccacgttgaaccatcctttctagtcattatgtaaacggttattattatctcacatttccgccgtaagaaaccaattatacgctcatcgtcatcacaaaaaccatctttagtgcccaagcaccacttccgttattattttcctatttttcaaaaattccggttaaccgggtaactgtccgggtaaatcgctactgtagccaccacacaattgaaggaggaaatcatatgaaacgtatgcgtatcccgatgtccgttgcccttggcgccgctttgtctctgactcctctgtcctttgtatccgcaaaagaaaccccggtccctcaaaacatggcacagcaatcatcagatgcctcagcaaaagatgtcggattaaacattgacgttgacctgctcggcatcggcaattcgattgctgacgcgattaagtcggcgcaaaaccgtgacggcttcgtcaaaaacttaatggaatcttcattctacgcttccggacaaaaatataacgtcatggtgtttaatttaagccaggaatatgaagatcattttaacggtgttcagttctacggttccgccgtttatgacggcatcacgtacggcatttgggtgtttgaagacggaagcttcaccaataaaggtgatggcggctggatcaactgggccttcagaggctggtttgaccgcgacggcgatcacgtcgaattccatcgtccgtaatcaaaaaaagtccggcgacagatgccggacttttttgatttattcatctccgtcaagcatggccgcttctacatcattgatgtattggcgaagctcatgtgacatatcgcgggaaatttcccgctcttcgaacaatgtttggatttcgttgcggatggcctgcacggcccgcagtttgatttcgagtttttgattttcaaaacggcggctcggactctgttcgtgatacgagtgccccagcctgaaaatcaagtgattgtaaaaggaaatgacggcaagcgtcacatctttattttcttcagtcatgtgttttttcaggctttcaatggccgcttttgccgttttaacccttgtggcgcggatgaggccttcttcatttaaaatcgtcatttccggctttttttgttcaccgaaaaagatccagtacatcaggcgtttcagctttttcttagataagccgactttaaacggattcgtatacagcacttccagttcatcaaaccgttcctgaaggctgtcagccgtttcttccggtatgtcgccccgctcaatcagccgcagcaattcttcctgttcagcctgtatcccttgggcgcggactttccgctcatcttttttcgtgcggtttttgacggtgaactgctgaaatctgagatttttcattttctcattgtattcggcaatgaccgcaaaagaagccgttttgtttgtctcattcatattttctttaatggcggttaaggcagcctttatcagcttccgtctcgctgtcagcaatttgactttcttctctttcacattgtcttccggcttatctgtcaaaatcggcagtacgattgtcgccagcaccaatgtgcacataataacacccgcggctaaaaagagaatcaaattccgttcaggaaacggtgagccgtcagagagcacgtaaggaatggaaaaggaacccgcaagcgtgaccgctcccctgacgcctgaaaccgaaatcagcagggtcgagcgcaggccgggtttataaatgctctgatccttgttaaaaaaccacttgccgttccaaaaaaacagcacccacaaaaacctgagaatcattaacgtcagcgtaatgacgataatgtacccgatgaccatcatattgttaaacgcggtatcattaaagatgacggaaaccacatccggtatttgcgcccctaaaataacgaaaacaagaccgttcagaatgaacaaaataatattccacgtacttgaagagacgatttgcagtttgaccatcgttgattcaagacggtcctgctccaccgcatgcgtgatgccgccggccacaacagctaaaatgccggaaacgccgatttcttcagccgcgagatagatgacgaacggcgtcagaatttgaatcagcatatgcatcgtgacatcctgcatgccgaggcggcgcaaaaacagccggaaacggataatcaaaaaagaaatgacgacaccgctgagtaaaccgccggctgaaatcagtacgaaactgaaggcggcctgcgccagcgaaaatgcgcccgtcacggcagccgcaatcgcaaatttaaaagcgaccaggccggatgcgtcattcatcagtccttctccttcaaggagacgcagaatgccttttggcatcttcactcgccctgacagcgcgctgaccgcgacaacgtcagtcggtgacagtatcgccgccagcccgaacgcggcagccagcggaatgctcggaatcatccaatgaatcgtgtaaccgccgacaatcaccgtggcaaacacgagcccgagcgcaagcagcagaatcggcgctcttaaattccaaagttccgcacgcggcgtccgttttccatcgttaaaaagcagcggagcgataaacaaaacaaaaaacaattcggtattcagttcaaagtgaagcccctgcggaaatgacgccgcaatgataccgagcgccacctgaatcaaaggcaccgggataaaggggacaaaccgatttacgatatttgagatcgcgatgatggttaaaagtacgagtacgactaaaaatatgtccaaagcatgacctccttcatctgctgcatcatatcattattgcctgatctctgcctttgccaaaggccggagccgatgatcgggcagattcaatatattttccgcacgcaaccattcttcttttattttacccgtttttatttaaaatttctcataacgtgctcacggggaactttttttgccttcagctacattttttccgaaaaaagaaaaagcctgttttctctgaaaacaggctttttcgcaagctgcgtcatctgtttcatgacgcggtgcagcgtttatgcttcttagtaaaggatagagaacgcaccgtcagtgtgtctctatccttggttttaagtgctcatcttattcgtgaaaattcgtgccgtctgtcgtcgctttaatgatgccggcgcggatgacgaaatcgccgaagtgttcgccttcctcacgctctttcgcgtagcgcgggagaatggtgcgaagctcattcagaatttcttcttcaccgatattttcccggtacattttgctcaaacggctgccgtcaaacgccgctcctaaatacatattatattttccgggcgcctttccgataaatccgatttcgccgagcgcatggcgggcgcagccattcgggcatccggtcatacggatggtgatttcttcatcccgcagcccgttttcgtcaacaatgtcttcaatcttatcaatcaatttcggcagataccgctcggcttcggccatggcgagcccgcatgtcggaagcgcgacgcaagccattgaactgcggcggagggcggaatgctgccggccgtctgtcagaccgtattgttcgattaatgcgctgatttgtttctttttctggctcgagacattgccgataatcaggttttgattagaggtgagacggaaatctcccgtatggactttggcgatttcacgcaatcccgtcatcagcttataattctcatagtccgtgacgcggccgccttcgataaacatcgtaaagtgccatttaccttttacacccttcacccatccgtaacggtcgccgttatggtcaaaatgataaggtttcgcttcatccagctgccagccgaggcggttttccagctcggcttttacgttttccagcccgagacggtcaacagtgtacttgaatctggcattctttctgacggaacggtttccgtaatcgcgctgaatcgtaatggttttttccgctacatcatacagctgctccggtttgcagaagccgatgacttttgaaagctgcggataagtggccgtatcgccgtgcgtcattcccataccgccgccgattgcaacgttgaatccgataagacggccttcctccacgatggcaatgaagccgagatcttgagaaaagacatcgatatcattggacggaggcacggcgattccgattttgaatttccgcggcaggtacagcggcccgtacatcggttccgtttccgtgtcaggagtgcccgccacacgttcctcatcaagccagatttcatgataggctctcgtgcgcggaagaaggtcatcgctcaatttcttcgaccattcgtatacttccgcatgaatttcagactggtgcggatttgaagcgcacatgacgtttcggttgacatctccgcaggccgcaatggtatcaagcagcgccgcattgattttctgaatcgtttttttcatgttccattttaaaattccgtgcatttggaacgtttcacgcgttgtcagcttcaatgtattgtttccgtatttttgcgccagttcatccatgacaagccattgttccggagttgacacgccgcctggcatccgaacgcgcagcatgaactgataagccggttcaagcttttgtttttgacgttcattacgaagatcgcggtcatcctgcaagtagcttccgtgatgcttcatcagccggttgtcatcgtccgggatgccggctgaaatccggtcgagcatgacttctttcaatgtgccgcgcaaataatcacttttttctttaatttcctcaacatcacttggagggccttccggcgcttttaaaatgttgttcaccatgctgaataagctcctttcaaaccaaaatcaatatacgtcacgctgatagcgttttttctgctgcatgtctgccaggaagctttccgctttttcacggctcatgccgccttcttcctgaatgatatcgagaagcgcctggtgcacgtcatgcgccatatgctgttcatcaccgcagatgtatacggcggctccctgctgcagccattcatacagctctttgctttgttctttcatgcgatgctgcacatatactttttcctccgaatcccgggaaaaagcgacgtccatttttgtgagaacaccgttttgcagccatttttgccattccgtctggtacagaaaatcagtgacaaagtgctgatccccgaaaaacagccatgttttcccttcagctccggtttcttcacgctcctgcataaaggaacggaacggcgcgatgcctgtccccggcccgaccataatgatcggtgtatccgggttttccggcagcttgaagttttggttgtgctgaatgtaaatcggaagcgtatctcccggctggagtctttccgcgcacagaatgctgcagacgccttttcgttctctgccgtgcgcgtcatatctgaccgctccgattgtcagatgcacctcttccggattcgcttctaaactgcttgcgatcgaatagagccgggccggcattttacgcaggatggaaagaaagtcttccgctgtcgcttcccacggaccgaaatcccggacgagatcaagcagatcacggccgttgatgtacgctttcagctgctcttcgtttccttcggccagaagttcactcagcttttggtcagccgtaaactgtgcggccttttgcaggaacggttttgttaaaacggttatttcaaaatgagaagtaagcgcatctttcagcgggaggcgctctccttgtttattcaccgccacttcctgttttgggtcccatttcagctcattgatcagctcatcaacgagcgccggatcattttccggatagatgccgaggctgtctccgggctgatacgcgaggcccgatccttcaagcgaaagctcaagatggcgtgtctctttattcgaaccgcgtccgttcagattgatgttctcaagaacctccgcccgaaacgggttcgttctggaataaacggattcaccgagagccggcgtctcggcaggcgcttcggctgtttgatttcccgctccttcgttcaaaccgccgatgaccgcgtcaagccattcagaaaacggctcatcataatcaagatcgcaatcaacccgcggcgcaagctgggtgccgccgagctcttgaagacgctcgtcaaactctttgccggtctggcagaaaaattcatacgagctgtccccgagcgccaaaacggagtaacggagcgcttcaagcttcggcgcgcgtctgccgtgaagaaattcatgaaaggccagcgcgttatccggcggatcgccttctccgtgcgtgctcaccacgatcagtaaattgtttatttttttcagattattcggcttaaaatcgttcatcgacgcgacggtgacctggaatccccgttcctcaagcgtctttaccgtctgtttcgcaagaccttccgcatttcccgtttgcgatccgtataatacggtcacttctcttgagactgccgggctttctgcaggagccggagcagcgggtgcggctgtttcaccggattcggaccgggccgcagccaaataaccgctcagccagattttctgtgattctgtcaaggtcggcagaaggcggttaaggagctctgcctgctcctgattaaacggactgttcatgacctgaagttgcaacgatatccacctcacaaggaattaaacgtaacgtacgttatttctataggaattgtcaaaataatattctaattgaaactttaccgaaagtttgtatgtaagtaaaatatataatcatgatgacaacgattaagattactaatgataaaaagccctttgcacttggcaaagggcttacacgaataagccggcgggcacttctttaataaaaggagagtgttctcccggagacaatacggtcagatgatgcatcgcccgcgtacaggccgtatataacagcttacggtcatgttcgcttttgtactggacagcagaggcgtcagcggcaatgacggcgtcaaactcaatgccttttgccaaataaacgggaatgacgcatacccctttttgaaaaggctggttttctttattgatcaagcggacaccgctctcggcgctgactgcctgaaacacttttttggcttccgcggccgttttgcagatgacggcgaccgtctcccagcctttttgtctgagctcccggattgtatccgccaattgttcctgccgcgcattttctgtatccgtccgcaaaacacgcggtttttccccgttccggttaaatggctcaatgtcatcgccgtcagccagcagcgctttcgtaaattcaacaatctgccgcgtcgatctgtaagtccgcttcaggctgacatacttttctgcaccattgcgaaagcagccggcgagggaagaagggcccgtaatggtgtgggcataaatcgactggctgacatcaccgagcaccgtcatctttgccgctgggaagatgctttgaatatacgtgagctgaaatggggaataatcctgcgcttcatcaatgaagacgtgcttcatttgtgtgttttttctttttccttctaacagatcctgcaaatacagatacggagcggcatcttcatacggaagtgatcgttctgcaaatgcgtttctggtcaaagcgccgatgctctcccaatgatcgggcttttcatcagctccccagtctgaaaacagccggagatacatccgttttatatcgagaaagccgagccgtctgacggcctgcttaatcggtttaaaggctttgccgacaataatggcgccaagcagccgctgttcgcgctgatggtcgtcaaatgcaggttcatcatctgccgcctgcttcttgagtgtttgataaacctcagcatagtcttccttatcaagcagctcgctctcctgcaagacccattccttcttacgctcctttttttcgagagcgctgatttccgcgagaagccattccgctgtcagctccgctctgttcggaatcggcagctgctgatcaagcgaataaaaatagtcttcaatccgctcttttgaaatcaggatgtctccccggaagctgatctgtttacacatcaggccagagccggaaagcgagcaggcgtagcggtcaatcatggcctggaaagctgatgacgctttgtaagcaatggctgcgagccttacggaaagtgcgtcctgattttgttcagtcaggcaatattcaagctgctcgtacgggctttcacaatcaaactttcgtccgagccggcggatgatatattcctgaaaggtggcctgctccatattctcttctcccaattccggcaatacggcggaaacataactgttgaacaaaatgttcggggaaaacaatacaatctgacgggcatcaagcaccccgcgcccgcggtacagcaagtaagcggcccgctgaagcgccgcggatgttttcccgcttccggcggctccctgaacaatgagatatttgcttttttcatcccggatgatttcgttctgttctttttggatggttgacacgatgtttttcatatgctgtccggaatgcccgctcagcacctcttgcagcatttcgtcaccaatcgtcatatccgtgttaaacatcgctttaagcgtcccttttttaatgataaactgccgcttcagtgtgatgtctccttctatcgtttcttcgggaacttcatagcgggcttttcccggggaatattgatagtaaagagatgagatgggcgcgcgccaatcataaatgagaaattgctcgttgttttcatccatcaaagaagtcagcccgatataaatccgctcggaagaggactcccctttttccgtaaaatcgacacggccgaagtaaggagaggttttcagcttttggattttttgaagctgccggtattgaagccgatgcgtccgttcacgttctgaaagcatttctgcctgctgtttaatgcttgaaaatgtctcagccgcttcgtgggcgtcatccatattcacggtgacatcatcccaaaacgtttttctcagcccgacaatatcctgcttcaatccgcccgatgaggcttcaagatgagtttgtttctgttccagttccttcatgacaaaattgattctttcctgctcttctttccactctttatcacgttttgccatcagcggcacctccgacatcaagctgacaaatccggctttcatcatacaaacatatatgcaacatattattcagcattatggtcaaataccctttttcttatcatatcgggcgtctttttttatcagaagccgttatgaaaaaaaaccgatttctttatgaaatcggttttttactgatctatatgataggaacgattcggcaggcgccacctgaacacataactgcagatgcggcatgccacaagcacaagaaacagcacatacaaaccggcggcatccccggcccagccgaggcccacgattaaccctccgagcgcggcccagactgcataaatttccgccttgagcacaagcggcttcctgcccgcgagcaaatcccgtatgatgccgcccccgctgccggtgaggaccgctgccgcaatcaccgcactgagcggatggcccattttcacggcatataaagcgccttggatggcaaacgccgaaagcccgatggcatcggataggttgccccatttactccaatgtcttaacagcagcttcggaaacaaaaagacaatcgtaactgatgcgagagcgatttgaaaaaacgcgccttgctcccacaaggcggagaccggaacaccgatcagcagatttcggatcgctcctccgccgaacgccgttacaatccccaagatgtacacgcctaaaatatcatactcctcttccatcgcaacaatcgctccgctgaccgcaaacgcaatgatgccgattacactaagcagctcccaggccattccatatgctcctttttatttgttaaattttctgacgaccattagattttataatcgctttctcttaaaatcaaccttatttttgaaagattctgattcctaacccgggacaacctcactcgcaacggctgggagcaagaacatttacctattttatactattttgggaggtttattggaagtttcattgaatactttctctaacaaaaagggggttatgagatgaaaatcagttcacttgtttttcctgttttattggccgccggattaattcccggcctgccgtcagccgaaagccatacgcattcgcacactcatgcggagccggcgaaaacggtgtatacggacccgcttccgaaagccgatcattttaaagatctgaagggcccggtccaagtcgaacagacggttgacacaaaaattctggatgaaaacggcaagcaggtcggcacgaaacgattcaatgccaatgtcagtcaggataaagcctcaactaaagccagcacgggcagccagaaggtcagagtgctggcggtggcggacgctgaataccgcgccaaatacagcgactggcaaacgcgaatcgtccagatcgtggagcaggcggatgttgcttttaaccgtgatcacaacattgatttcgtcgtacaggccgtgcaggcttggaattcctcgggctcaaacagttctcagattttatcgaatctccaaggcagcttcagaaatcaaaattatcattttgtcgtcggttttaccgcaaaatcaagttttgacgccggcggtatcgcgtatgtatataacggcaaaccgagcggcccggctttcagcgtgaaccttgatcaaggaacggccaacacggcgaaagcggcacagcacgagttttcccataacttcggacttcagcatgacgcccaaggcagcggcatccgctgcgtcatgaattatgattatgcctattccgtggatatttgggacagctcccataacagacagattgagacaaacaaagcttggtacaaataatagaaaaagagccgctcccatggagcaggctctttattttgccgtgcgttccgttttgacaaaacacatgcagataataatgagaataaatgccgtcaatgccaggaaaggaatggtaatgaaaccgaaccagttaatatattcagatgagcaaggcacgccgtagacacacggcttgatgccgctgaaaccgggcaccttctgctcaaggtaatgcatgatcgatataaacgcgccgatgacggccatcggcagcacgtatttttttacgcgcgtgtcaccctggaaggtggcgattcctaaaatcaggacaagcgggtacatgagaattctttgataccagcacagctcgcacggtatgaattttctgatctcgctgaaatataggctgccgagcatggcagcaagagctatcacccaagaagcatataaaaatacgattctatttttcatttttcagctctttcttaatcgtttttgaaatctcatcataatcagagaattctttaatcactttgtcatttacgtaaatcgtcggtgtcgccgtaatgtttaatttatcattcaggtcagtgtcagctttcagctcttttgcaaatgtctctttatcaaggttttccttcagcttgtcaggatcaacctttttcgcggtgcttttgaccgttttttcaagcaatgcaggcgtgacccattcctgttcgcttgacggctgctgttcaaacagcttttcatggaatgcccagaatgatgccgggtcttctttccacacctcttctgaagcaagagccgccagacgcgagccgcttccgtggtacatgacgttcacaaatgaaaatttcacgtcgcctttatcgataaaatcttttttgattttcggaaagatatcgctgttaaatactttgcatgacggacacttgtaatctccgaattcaactaccgtaacaggggctctgtctttgccaagcacgggctgtcctttaatggaaggctgttcggcgactgtttcgcccgctttttccgtttggttgttaataattacgatggccgcaaataaaacgacaacgattaacgtcagaatcaccgcaaatttcgcagacgattgtttctttttcactcagacacctcattgtttttaaaataaaaaagaagcggatgccggatggcccgcttctctattttaccaagacaaccttgtttaagaaaaccctgaaaaacgaattatctttgacaattattccgctttcactctcatgacgcgcatcgcgttggcaacggcgatcagcgtgacgcctacatctgaaaagaccgcttcccacatggtggcgaatccgaatgcgccaagcaggagaaaaatgatttttacgcctaaagcaaatccgatgttctgccagacgatcaggcgtgtacggcgtgcaatccggatggcttcggctgcttttgacggctggtctgtcatcaggacaacatcggccgcttcaacggcggcatcagagccgagagcccccatggcagctccgatgtcagctctggcaagcacaggcgtatcattaatcccatcgccgacaaacatcagtttttcattcggtgcaagcgccgcttcaagttcttcgacgcggtctaccttgtcacccggcaaaagctctgtgtacacgtcatcaataccgagctctcggccgacagcttctccggtctgctttgaatcacccgtcagcatcactgtccgcttcacgccgagcgcttttaaattggcaatggcctgtttggcgtcctctttgatttcatcggcgatcacgatcgcccccgcatactgctgatcaacggcgacatagacgacggttccgttgttttcagctgtgccggaagcgatttgttcttttgccatcagtttttgatttccggctaaaatcgttgatccgccggttttcacccgaatgccgtgtccgggtatttcttcatattcttcaatctcctcagccgagagcggttgattgtaagcttcacggatggaagaagcaatcggatgattggaatgggcttctgcaagcgcggccgcatgaagcaggctgtctttcgtaaatcccgccgccggtttgatatcagtaacggcgaaattgcctttcgttaaggttcccgttttatcaaacacggcgtatgccacctgattgagcgcttctaaatagttgcttcctttcacgagcacccctgctttagacgcagctccgataccgccgaaaaacccgagcggaatggagacgacgagtgcgcacggacaagaaatcacaaggaaaatcagcgcgcggtacacccagtcggatagcgcggctgaaggcacgagaagcggcggtaaaaaggcgagaagcaccgcaacaatgacaacaaccggtgtataatacttggcaaacttcgtaataaagttttccgttttcgctttgcgtccggccgcattttcgaccatatccaatatttttgacacggcagagtcttcatatcctttagaggtttcaatatgaagcacgccgttctgattcataaatccggccatcacatcttgccccggctccgcttttcttggcacggattcgcccgttaaagcggatgtatcaaccatcgaagaaccgctcagcacctttccgtccagcggaatccgttctccgggattcacgacgatgacctgtccgactttgacgtcctgcggcgaaacggcagtcatgccgttttccgttttcacattggcgtactcaggacggatgtccaataacgcgctgatcgattttctggatcggctgacggccgctccctgaaacaattcaccgatttggtagaacagcatgaccgcgacgccttccggatactgatgaatcataaatgcgccgatcgtggcaagcgccatcagaaaatgctcatcaaatacctggccgcggacaatgttttttcccgctctggctacgatatcgccgccaataatcaaatatgaagcaaaaaagagcagaaactcaaggacggcgctcgtgtgcgcgaagtaagcgatgacggccaaaacggctcccgcagccagcctcactaacatcagctgcagctttttgcggtactcatcctcgccgggtttgtcttcgtgcttcgaacgaacggtcacatgaggatcaatggactttacttttttcacaacctcatctttcatccattgttcgtttttgccgccggctgagaccgtgatggtgcttgccgcaaaattgacagcacagccgtctatgccgtcaatggcttttacgccgttttctattttttttgcacagttgctgcaatcaagtccgtctaatacaaattcacctttggctgctttcattttcgactcaccctactttccgtaataggattcccataacatcaatacagctaaacgaatttatatatatgaacatatactcatatatgtgttttctctattatatgcaggctttgaataaagtgtcaataaaaaagacaaaacaggcctcagcctattttgtctttttttaccctctgtaaacgcaaagcattaaggacgaccgatactgagctgaacgccatggcagcgcctgccacccacggggccagaaagccggacgccgcaatcggaatgccgatgctgttgtatcccaatgcccagcctaaattctgcttgatgtttctcatggtcagcctgctcatgccgatggcgtcggcaatgccgttcaggtcaccgcggatcagcgtaatatccgccgcttccattgcgatatctgtgccggtgccgatggccattccgatatcggccacagccagcgccggagcatcattgatgccgtcaccgaccatcgccacgcgccggccttctttttgcagccgggaaatttccgccgccttttgttcgggaagcacttcagcgatcacgctgccgatgcccgcggcttttgcaatggcttccgcggtctttttgttgtcaccggtcatcatgatgacgtcaagccccatatcattcaggcgtttcaccgcggccggagatgtttctttgattgtatcggcgactgcgataaggcccgccgctttgccgtttgccgcaataagcatcaccgtttttccttccgcctccaagcgggccatgtgcggaagcagcgcctcatgttcaatgtgttctgattccatcagccgtcttgatccggcaagaatcgttctgccgtcagcctcggcgtatattccggaaccgatccgggcttggaaccgggtgattttcgggatggcaatcccccgtttttcggctcctgacacgatggcttctccaagcgggtgctctgatcccgtttcggcggccgccgccagccgcaggagttcctcttcgctcattcccgctgccggtacggcatctgtcagaaccggtctgccgtttgtcaccgttcctgttttatccagtacgatggtcgtcagacgctgtgttttttctaaatgctctccgcctttaaagagaatgccgaattcagctgcacggccggagcccgccataatgctcgtcggagtggcgagcccgagtgcgcacggacaggcaatgacaagcacggcgatgaatttgccgatcgcttcagaaaactgtcccggcgccgcccatacataccaaatgagaaaagtcagcacggccagccccagcacaatcgggacgaaaatgcctgaaatgtgatctgcgagccgctgaatgggggcttttgatccttgggcttcttccacgattttaataatgtgtgcaagcgcggtatctttcccgacattcaccgctctgattttgagaaagccgtttgcattgatcgtcgccccggtgacggtgcttccgggagacttatcgacaggcatgctctcccccgtaatcatcgattcatcaattgcggaatggccttcaatcacttcgccatcgacaggaacacgttctcccggtttcacatatacgatatcccccgtccggacctcgtcaatcggaatcacctgtaccttcccttcccgctcaaccgccgccgtcttcgcctgaagcttcattaactttttaatcgcttctgatgagcggcctttcgctttcatctctaaaagctttccaagcaaaatcaaagtcagcaaaatggcgctcgtttcataataaagcccctctacatgtccgtctcgtccgagagacgcaatcgtcatgtacaggctgtatgcgtaagcggccgtcgttccgagcgcaacgagaacatccatattggcgcttttgtttctcatcgtcttgtacgctcccatataaaaaggccagccgatgacgagttgcaccggggtggcaagcgcgaattgcagccacggattcatcaggatatccggcatccagataaaagaagtaaaagaaaaatggctgaccatcgaccagagaagcggaaaggagagaacggcagaaaatatcagcctgatcagctgctttcgctgctctttctccttttgggataatccgccatctccatcaaccgcttgcttctcgtctaatctgtagccgagttttgccacggtctctttcagttctttcggtgtcacctctttggggttgtattcaacggagaccgtttcaagggcgaaattcaccggcgcgcccacaacgccctctgttttgttcaggcgcttttcaatccgattggcgcaagcggcgcacgtcatgccttcaatctgaaactcggctttttccgtcacaacatggtagccgagtttttcaattttatcctttatggcgccagcttcgattttgtcaggctgataggaaatatttgaggtctcaagcgcaagattgacggaagcgtcattgacgccgtccatccgtttcagccctttttcaattcttgaagcgcaggcggcgcatgtcatgcctcccacttgaatggtcatctctttcggttcactcaatgccctcacctcttctcacaaacccccagggggtatcattttcataaaagaaaaccgcgcccgtttccgcagcgcgataaatcctatacgacgtcataaccttgatcttcaatcgcgtcttttatatctgatacggagactttgttctcatcaaacgtcacatccacctgtccggcttccaatttcacctgaaccgccgtcactccgttcagttctcccactccggtctctactgctttgacgcagtgctgacaggacatgccttcgacttgcagtgttttttgttccatgataattccctccacgtcttgttttttcttcttcatgttaccatacccctgtagggtatttcaaaacattttattttacgattttgcgatttttttcacaacatcaagcagctcggcaatcgcctgctccccgtttccgctctcaatggcgccggctacgcagtgatgggcgtgatcttccagcagatgaaacgcgactttctgcatggccgcctgtacggctgaaatctgcacgagaatatccacgcagtatcgttcgttatccaccatattctgaatgcccctgacttggccttcaatccgtttaagccggttcaggatctggtctttttctttggcgcttttatgatttaacgattgatgctcggtatgtttgtccattttccacctcggtttttttcttcgttatcttcattatacagacttgaaaatccggtgtaaaaaattttcaacacacaagttttaccagtacacccgcggggtatataatgttatcacttatcaagagggggaaactcattgaaaacgatacaagttggcatattgggatatggtttgtcgggtaaagtttttcatgcgccgcttttggacgtccttgatgattatcagatcaaaaaagtcatgacgtccagaacggatgaggtcaaacgtgatctgccgggggctgaagccgtgcgcgcgattgaagacattaccggtgatcctgacattgatctcgtcatcgtcacgacaccgagcggaatgcattatgaatcagcgatgaaatgtctcctggcgggaaaacacaccgtcgtggaaaaaccgatgacggcgacttcagcagaagcggaggagctgagaagaacggctgaagataaaggcgtcttgctgagcgtgtaccataaccggcgctgggacaatgactttttaacaatacaaaagctgattcgggacggggcgcttcaagacattcatacatatcaagtcagctatgatctcggttcacatattattgaccagacacttctgcttttcggaatgccggaatccgtcaccgcacatgtgatgaaacagcgggacaacagtgaaaccgttgataattttctggccgcgctccattacggcaaacttcagttcattcttcaatccggctccatgaatgcggcaagcggcccgcgctatcagattcacggacggaatgcaagctttatcaaatacggaatggatggacaggaagatgcgctttcagcgggcaaaaagccgattgacgacagctggggcgccgatgatcctgacaacttcggagagctgacaatcgcagcggatgaaaaacggcatacagaaacaatcccctctgagaacggctcttaccttacgtactacaaactgctggcagacagcatcttaaacggaaaaccgcttcccgttacggcaaaagaaggcatcgatgtcatccgtgtcattgaagcggcgatgaaaagcagcgaacaaaaacggacgattgccctttaatatgaaaaacctcccagccgtacggcggggaggtttttttaagatcagaatgattttccggcttctttcgcgcgggcaatcgcatcttctttaatttgctgtgctttattcggttcagcattatggccttcaacgattaatccgtcaaaagaaggaacgccgaagaagttcatcatgatgccgatgtaacggtggcccatttccatgtcagccgccggtccttcagagtaatagcctccgcgcgcctgaatgtggagcgcttttttgtctgtcaacagaccgatcgggccttgctctgtatatttgaatgattttccggctacagccacagaatcaaggtacgctttcataacaggcgggaatgagaagttccaaagcggtgtgacgaatacgtatttgtcagctgccgcgaattgatcgctcagctcgttcagacggctgactttcgctttttcgttttcagaaagctcttcaaaacctgtgccggattgaagttttccccagccgctgaatacatccgcgtcgatatgaggaatgttctctttgtaaaggtcgatatgtacaacctcatcattcgggtttgattctttataagaatcgataaacgcttttcctgtcgccatgctgtaagatgtcttttcatcatgaggatgagcagtgatataaagtacttttgccattgtaaacagccctttcgttttcagattacacacacatttattatgaaatatgaatgtttttttatactgatcagttctgtaataattatagttacaaaaaaatcttttcgcaacaataatatctcgaaatcagtatatttttttgaaaagactgcaagaagtacctccagcaaatcgaaaaaaacccgcgttaagcaaatttcgacaaagaaaagaccgattttgaccatgttaagcctaaatcggctgtttcatttcagacagttgtgtggaatttatccatgcaaaatgttcctgctcttatattagagacaaacgaattccgcttcatacgttcgaatttatcacactcttttattgcaggtctgcttgccagtttaacaaatgtttcattttctgttctgtttcaccttcttggcggggttggtaaatggttaattttagttcaggggcatcgtacacttgaagagtaatatgatccataatcatttctccaactaaaggatgcagcagtgtttttttgccgcaaggagtacctagaacttcatgcttggaccaccaattacgaaactcagggctcttattggtaagttctttaataatatctttaaaccactcatcaccgacaaaacgtgtataggctaaacgaaattgagcaatcaagcgttgcgcatgatcttcccaattaagaaagaggtctcggtattctttagacgtaaagcaacgccagactgcattacgatctcgatcattcattttattaaagtcaccaaaaaccacggcagcagctttattccagcttactatgttcaatttttcgtcggttacatatgtagggcagtattctaattgactcaatacatttttcaggacgctatttacactttcaacgagaggtcttcccaccttagatagcaatggccgatttgctaataaaaatagatgctctttttcctcttcatttaacctgaatacacgcgaaatagcctccaatacgtctgaagatacctgtatatcacgcccttgctctaaccatgtataccaggttactcctattcctgccagctgagctgcttcttctcggcgcagtccttctgtttttctgcgcggaccaataggtaaaccaaagtcttgaggagataatcgcgcccgtcgtgtttttaagaaatcccctagttctttccttctttctttgtcacttaacatgaacttctccccttataagtagtagttttaataataggataaacacactcctattcccattataaaccttcatctattctaataaatgaaggaggtgagttttatggttttcaaaaatagggctgagcctttcccgaaaggattagttctcctcatggctgcagcatgtggttttacagtagctaatgtctatttaaatcaaacgctcttagtcagtatggcaaatacttttcacgtttctgaaaacaatataggaattgtagcaactttaactcaagtgggatatgcattgggaaatcttttattggtaccattaggtgacatttttgaacggagaaaattgatcctaagtttattatctattgtatgtataattttagccgcaactgctttatcaatgaatgtaacgtggctgattgcagcaaacttaattcttggatttgttaccatagtccctcaaattattgttcctcttgctgctaatttagcttcagaagagaacagaggaaaagtgttagggaatgttgccattggcttagtgtgtgggattttaggcgctcgatttatcagtggttttgcagattcccattttggatggagatcaatgtattgggcttcttttgctggcacaatgataatgatcattttaatggcaatgtatcttccaaaaagcaaaggaaatcatgcaatgcagtataaaacattacttgcatctttaggcccgttatttaaaaaagaaaaagtgttgcaaaaagcttgcctgagtcaaggaatgatgtttggttcctttagtgccttctggacaactcttatttttttattaaatacttctccgtattcttatgggagcaccgcggcaggtttaataggtttagtgggaatagctggagcctttgcaactcccatgataggccgggcgatcgataaaaaaggatcaaaatttgctaataccttatgtatgtttatttctttaatcgcttttctgaccttaatattcttaggatattggttaccgggattaattcttggcgcactattagtaacagttggcacgcaagcaaatcaagttgcttgtcaagctgctatctttcaactatctcctgaaaagagaagcagattaaatggtttatacatggtatctacattcttaggcggatctttaggatcatatctaggtgtacttgcttggagcaaatggcattggtatggagtatgtacagttgggatactcatgataggtattgcttttagttccttatttagcttacctaaaaaaagaacagtaaaaaatagagaattcgagaaaggaagtcatatctaatgtctgaaaatacagaaaactacaaaaagggattggaagttctatcaaaaatagatccgcacaactatcaaaatatcgtgaacagttttaaagattcagcagcacctgacttgggaactttggctgtggaatttaattacggtcaaattttttccagaccgggattagatttaaaatcccgccttcttgcagcagttgctggtctgactgctttaggaaatacggaacaattaaaattttatattaacggagctttaaatgtcggatggaccgaagaagaaattgtggaagctatgatgcaaatgttaatttatgcaggctttcctgtcgcattaaataccattttaacaatagctactgaagtattttctaaaagacgaaatcagctgtcagccaatttattggaaggagagtaaaaaatgattattgatagtcatgcccacgtagttctacctgtagaaaaacacattgaaatgatggattcaagcgggatagataaaactattttattctctacgcttgttcatccagaaaaaagtgaaagctacgatgaatttattcaggaaatggatgtactgaatcaaattttaaataacgagataaaccccctagaagcacgagtaaaagctctagaagaattaagggatgctatcgcaaaatatcctgaccgttttattggatttggatcagttccccttttaagttcctccggagaactgcgtgattgggttgagaagattgtaaaagattataaaatgaagggacttggagaattcacccttggttcaggccaaattaaaatgcttgagcctgtattccaggcagctggtgattataattcctttccgatttgggtgcatacattccatccactcaatttaaatgatattcaggaattgttcgctttaactcgtaaatatcccactgtccctgtaatctatggccatttgggagggattcattggcagcaagttattgcattaacaaaagaaacaaagaacgcctacctagatatttctgcattttatacaacctatgcattatctttggctataaaagaactcccagagaacactttatttagttctgattttccatatggtgatccattcctaaataagttggcagttgaacgccatgcttcaagtgaagaagtcgtacaacgagtactaggcggaaatattgctaacctcttaaagatttaacttatttttataacaatttcttagggaatataagtttgaaggattgcattcagcaggttttcattccttacgtcttttaaataataaagagccgatttactcttaacggttaacggggtaaatcggctcttttcttatccaaaatgctggcgggatccctttaatgacgggaatggcaagcagcagaaaaagcagaaacatttagtttctgctcaaaatcgggtttgatttacagaccggaatatccaacccgagattcccccgcagtgtatcggccggatagctttttcggtacagccccttttcctggaggattggtatgacatgatccacaaaggcttcaagcatgccggggatgtcagagtgaatgataaacccgtccgccgcttcccgctgaaaccatgtttcaattaatgacgctacacgttcaggtgtgccgataaaatgggttcgcggaaacgcggcttcgcgcgccacttgacgcagcgtaagattccgggctttcgcctctcttttgatacggtctgtcgtgctttgaaacgcgtttttcccgacgtcgcccaaatcaggaaacggctcatccagcggaaaacggctcagatcataatcgtcaaaaaatctggccacatatttaacagcgttctctatcggaatcagctcggcaaattcttggtatttcgcttccgcttcttcttgtgagccggctataatcggactgattcccggaaaaatccgcagcttggaagcgtcccggccgtaatccgccgcccgcttcttcacatcatcataaaaagccttcgtttcctcaagtgaattggagtgcgtaaagactgcatctgcattcctcgcggcaaacgaccggccggtttctgaagaccccgcttggaaaacgaccggctctccctgtttggaccggccgatattcagcgggccctccacttgaaaatactcgcctttgtgatacaggcgatgcagtttgtcagggtcaaaaaactgcccggtttctttgttgcggacgaaggcatcttcttcccaggaattccacagaccgcgcaccacgtccacatgttcctgggcgatggcatagcgccggctgtggtcgggaaggctttctttgctgtgattgcgcgcagctcccgcctgcggagaggtgacgagattccagcccgcccggccgccgctgatatggtcaagagacatcagctgtcttgcgatggtgaacggctcagtgaacgatgtggaaaatgtgccgattaaaccaagatgggttgtagaggcggcaagcgccgataagatagtgatcggctcaaaccgatttaagaaatgcgggatggacttttcagaaatgaacaagccgtccgcaataaaagcaaagctgaacagccctctttcagcagtctgcgctttttgcctgtaaaacgccgcattcgtgcttgctgtcggatcggcgtcgggatgacgccagccgtccgttgtgccgccgacaccgtgaatcatggctccgaattgaataagatctgtccggctcattttctctccccctttttcccctcgtaatcagcaagcgcccgttctacatgttcaatgccgacttgagtaacggcctgatacacacggctgtcaccgctgccgatttcaacgacgggaacatgacggatgccgtacttcgtctgcagcacgtcactcaattcgtcccgctctgtcacatcaattgtttcgtatgcaacggcattttcccgcaaatatcctttcacttcatcgcaataggagcagccctgtttgctccagaccactacgtttacttcatgactcatgttcatccctcctataattgcggggccggctgcaccgcttcgcttaacagccggtaagacaatcgtttttcctcagcgtttttgataggcgacaaaatcacaaaatcagtaatgctgtacggaacggataatcgtcgcagctcggcggcggcctcttcttttgtcccggcaatcacacccgtcttttgtgtaatcagcttatatggctgcgtgacttgttcaagaaacgcttccgcttgttcccgggaaccgacattcacctttttgccgtcttcgagaatgattttgaccgactcacgcgataccacgtgtttttccgcttctgcttttgtatgcgcggtaaagaccatcggcgcaaggtgaaattccgccttagaccctttcggcagatgctcgtcaaaggcgtggcgcgctttttctaacgcagcctcttcaccgtttatgaaataggcgaaaacgaaggaaatgccgagtttggccgcggatatcgcgctttccgcgctgccgccgagcaaaaagaggtcaggcgcatactcagtatgcggcgccggccgcaatgacgcgtagcggtgcgagtccggaaaatcatttcggatgaaatgagtcagctcctcaagcttttcttcaaataaacgggcgggctggataagctcccgctgcagcgcatcggttgacagctgaaatccgccgggcgctttgccgacaccaagcgccacacggccgggagcaagagcggacagaacccggaactgctctgccactttataaggactgtaatgctgcagcatcaccccgccggacgcgagacggatttttttcgtgcttgcggcaagataccccagaacaatttccggcgctgatcccgctatctcttcattgttatgatgctccgccgcccagaaacggtcatatccgtattgttcggcctcctgagccaatctcaccgtttgccgcaaggcttcttctgcggtttggttttccgcggtgacactttggtctaaaatgcttaaacgaatcatacgacaggctcctttatgcgctcttttatgtcataaccgtaatcaggcagcacgcggcggaggaacttcttcgttctttcttttttcgtcttgtaaaagacttcctcaggcgttccttgttccacgattgctccttcatccataaacacaatttggtcggacacttttctggcgaattccatttcatgtgtgacaatgatcatggtggcgccggtccgcacaatgttaagcatcacctcgagcacctcgccgacaagctccggatcaagggctgcggtcggttcatcaaacagcatcacatcaggatgaatggcaagcgccctggcaattccgacccgctgcttttggcctcccgacagctgattcggataggcgtgcaatttatcctgaagccccaccttggccagttcccgctcggcaatggcgtacgcatctggttttttcattttccttgcgaccgtcaggccttccataacattttgaatcgccgttttatgcgaaaacaaatgatattgctgaaaaaccatcgccgtctgtttcctcagtctgagaatgtcttttttggcaggctttttgcagttaatgacttcaccgtgcagcgaaatggcgccctcatccggccgctcaagtaaattaaggcagcgcagaaaagtggttttcccggaaccgctcgggccgatgatggtcacgacttctcctttccggacacttaaattgatcccctttagcacgtgatgactgccaaaatgtttctgaatgtttcggatttcgatcataatgcgcctccttgatatctggccgcccttttttccgccagactgtttacagcttcgagaatcagcgttaatccccaataaatcacggcagccccgataaatgcttccagaaatgcatagttatcggatgccgcaatcgtcgccgttcctgtaatttcaggcaccgcaacaattgccgcgatggaagtggtatgcaaaaagccgatgcctatgttggtgaagttcggcagcgatatcatgaacgcctgcggcagaaccacgcgccgaatcatctggccccgcgtcaagcctattgaatatgccgcctccgcctgccccgtatcgacggccatgatcccggatcggagaatttccgtcatataagcgcctgccgttaatgacagtgccatgatgacaaacacggcgaccggaatctgattggccgaccagccgagatgaaacgcgcggctgaattgatcggcaatcagcggaacccctaaataaatcagcataatatggagaatcgccggggtgctgcggaaaaaagacacgtaaaacgctgagcaggccagcagccatttgatgcggaatatacgcaccgtgatattgccgagagctatgaaaaatccggcaataatcggaatgaccgtcatcgccaatgtaagcggaacggttttcatcatttgtttgatcgcagtgccgataaatggaatgtccagctccactgttctccctccttttcagccgtgcgcgctcatgtcaaaaaccgtcacaaggcgcgtctcatctttcttgattcgtttttcggcccatctgaagacacattcaaataaaagggcggccgcataatacagaacagaaagcgagatatacacttctaaagaatgattgctcgatgtaatcaaggtctgtcctctgcccgacatatccatcaccccgatcgaaaaagcgagtgatgtatcttttaagaaaccgatcaccatatttccgatgttgggaaaggcctgcacaagcgcctgcggcagaatgatgcgccggaatgtctgccccccgttcagcccgatgctgaaagccgcctccgcctgcccgcggtcgacgctgttcacacctcccctgatgatttcggccgctcttgccgcgctgctcagcgcgtacgtggcgatggccgcatacaaagggtccattttggaggtatcaatcccggcgagcgccgtgagcgccggaataccgtaaaatacaatgaacagctgcaccatgatgggcgttcctctgaaaaaagagatatacagcttcgcaaactgattcaaaacgggaatacgatagatgcggagcagcgccaaaagcagccccaatagaaagccgaacagcaaagacaccgccaatatatacagcgtgacgggcaaatacccgagcaatgtcggcacaaaggacgcgatcatactgatatcaaacgctttttccattgccgatccctctctttttcacttaatattgctcctttgaataatcagcgccgagccacttttcactcagctttttaagcgtgccgtcatcaatgatttcctgcagggctttatcaatgtcatcgctcagcgtttgttcatttttgttaaacataaagaacactttggcatttgacagcaccccgccgaccgttttttctttgatcgcgctcgttttgttttggaaatcgacggcaaacggcgtagaaatcgtcgcatcggcgcggccggatttcagctgatttgccgcatcgttggagccttggccggcataagcgatttcaaacggactgccgtgttttttattccattttttcagcacaagcgcgccgtttgacgtcggacttgtaatgacccgctttcctttcaagtcatcaatgccgtgaatgttcccgttttcttgaagcaccgtgattttcagcgggaagttgttatacgcgacttgattgaacagaaattttttctcccgttcggcgcttttctccatttgatgggctacgatatcgactttatgctggccgaggctgacaagcaggttggagaaatccatcgttttaaaagtgaaacgatagtccggcaggcgcctgtcaagctctttcaccagctcaacgtcgtagcccgtcaatttgcctttatcatcaataaagcaaatattcggaaattgagttcccgtgccgaccgtgatgttcttcacgtttttctgattgcctgatgccgcctccccgcccgcgccgcaggctgataacgccgccgttgcggcaattgttaatgacatgaccgccaatcttattttcatgtgatcgccccgttttctgcttcaattatttcgtgaaacttgattttgaataatccgcgccgagccatttttcactcagtcttttcaatgtgccgtccttctcaagcttttgaatcgcccgatccgtatcgtcggccagggtttggctgtttttattgaacataaaatacacctcggtatccagcagcacatcaccgaccgttttttgtttgaacgcgtgcgtcttattttgaaaatcgacggcaaacggcgtggatacggtggcgtcagcgcgtcctgtctccatttggtttgctgtatcactgctgccctgcccggcgtatttcaaatgtatcgggctgccgtgggttttgttgtatgccgtcatataatccgccgcgtttgacgtcgcgccgacgatgacggttttcccttttaaatcccggagcgtgtgtatcgcgtcattatccgccttcaccgtgatgtacatcggcgagtagttatacgggattttgtgatacaaaaagcgtttctcccgttccttatttttcgccatattgtgcgcgatcacgtcaattttccggtttccgagacttgtaagcagattcgaaaaatccatcgtcttaaagacaaatttgtattgcggcagctgtttatcaatggctttcatcacttcaatgtcatagccggtcagctcgcctttttcatccataaaagcaatgttcggaaaatcagttcccgtgccgacaatgacggtctgcacgccgctccccgcttttgtgctttctccttgcccgcacccggccagcacgccgagcagcagaagcagacagccggctctgatccgtttttttatcattgcgcccagctcggtgtgcctaacagcgacgcgtcaaaccgctccggtatgagcacctttctcatcatgactccgatgtctccgtctttctcctgctcaaaatacacttcataccccctccgtctgtacatatctacaagccagggatgcttgcgcgccgaagtgccgagcgtgatggccggggccttcagcgtatcccgcagcacgtgttcctccacataagtcaaaagtttgctgccgatgccctgccccttcagctcaggaagcgtcgcaaaccaccagacgaacggatattttgacggaggcgtttcactctcccacggaaaacggatcgtaattgttgaaagaagccgtccgtcccgttcaagcacgacggctgaatgattttcaatattttctgttaccatatcgatgtcggcccgcgccgacggccagtcaatctccaaattgcggatcggctgaaacgcgctgtacagcagctctaaaaactccggcgcatcctttttctcagccaatcgaaatatgtcttcactcattccggtcactctccccgcaaaaatatataattccaatttgtttactaagctttgattgtttatactataaagcaaactaatttatttgactaatcaaaaaaagtaaaggaaaggttcaagaaaattaatgaacagccgggaggggatttcgttggaattacgcaccattaaaacgttccatacgatcgtacagtcaggcagcttttataaagccgccgaaattctgaactactcacagccgacgatttcaatgcggattaaacagctggaacaggatgtaggcgcgcagctgtttgaacggggaaagaagctgaagctgacaagggcggggcggctgtttcatgagcgggccgggcagcttctcgcgcaatacgaggtgcttgaccatactctggccgacatcagacaggggcaggccggccttattcacatcggcatatccgaaccgacggcaagcctgatcttccctgccgtactgcgggggtttttagatgattatcctgacatgtcggtcaatgtcagcgtggatgatgccaatacatgcagccgcaaactgctggagggcgccattgattttgccgtatgcggcgagccggagctgattctggaaaattatttcgatccgtttttccatgactcgctcaatgtcatcgtgtcagacagacatccccttgccgccaaagcaagcgtcaatctcgaggatttagaaaatgaatgcctgattttcacgcccgccaattgcccgatccggattcaaattgaacagcacctgcagcggtccatcggcagccgctatcgaaaaatggagctgaccagcagcatggctcaccaatactatgtcagggaaaatatcggcgtctcaatctttacggcgacggcgcactcagaaccgatcgagggcacgaaggtcattccgatccgtaacttaacaatttcaccgccggtcgggctgttgacaaaccagaaagaagagcattttgactctgctacaaaagatttaatcagcaggatcatcggccggtttcagcgtgatccgcattaaaaaaacccccgctttacgggggtttttgtacgttcatcttatataatgctccgcaccaagccgccgtcgatccgcaatgcagatccgttaatggcagacgacagcgggctgcttaaaaaggcgacaaagtgggcgatttcttccggacggatcaatcgctgaatgatcgacgtcggacgattttccttcataaatcgtctctccgcctccgccgcggtcaggttttcacccggataaagcgactcgagcattgtttcgacgccctctgttttcgtggagccgggcatgaccgtattcaccgtcacattcgtcccttccgtgagttcggccaggctgcgtgacagcgacagctgcgttgttttcgtagcgctgtaatgggccatttcctgagaaggcatgacggccgcttcactcgagataaaaatcacccgcccttccttccgttcaatcatccgctttgcataccggcgtgtcagcctcacgccgctcatgatattcacctcgaaaaaccggagccactcttcgtcaggaatatcaaagtattccgcaggttcaaagattcctaaattgttgacgagaatatccacatccggatactgctgaaaaatcgcgccgcatccttccgccgtgcctaaatcaaatgcggccggatagagacgggcatccggcgtctgtttctctagttcccggatcgtttcgttcaccttttcttcacggcggccgttaatgatcacggccgcaccttctgcaatcagcgaagccgcaatcgccttcccgatgcctgacgtagatcccgtcacaagcgccgtctttcctttcaactgcaaatccatcatccattcctccctatcgcaagtctcttcttatatatggacagaaatcgaaagcctgaaaccttccgtccctattatcggatagaaaaatagatgaggggaagtacgcactttttagtgcctgtccgttgtcccggctgacggctgatcgatttgaatgaaaaattcaccatctaattctgcctgagccttttttaatatccttaatacatcatcagcatccgaacccaattccttctgactgatctcaaaattcttccacaccaaagtcagcggaagttcgatccagcctgtcagacaatcccataaggcattcagattttcaccataaaagtccgggaaatctaattgatcttttaagattcggtgtaaagcttctgtgcttgtaacatcttttccgtctatgatgacgatttccatttacattcactccttgatttttgggcatgaaaaaaaccgcagtgcggtcaagtgacggcactgcggttcctctgttatgtatggagacggtgggagtcgaacccacgtccagaaacatcgattacttaagcgtctacgagcgtagcctgcatatttcgtgtttcactcgtcttcgtgcctgcgggcgggccttccgagagctagtctgtcagtctcttcttacgttctcagacgggaacgcaagcgtagcctacttggatgtgctcttcacggacacataggcaatgtcaggaagagctcgctgcgtttattaggcagctagtgctaagttttggttaaaacttttagttttgccagttatatttaggtgcgtgttaacgagatcgcctctcggctcgcagctcaagctcgatccatccctgtcgaatccgtaacgtccccttgttaagggtatacgggagatctatcaagctcttgctcaactggctgtactgttattatatcatgatcacagacaaattcaattgggaatgtcttcaataaacagcctgtgaatctgatgtgtgaacagtatagcatacggcagttatcacatcaaggctcatacatcagaagcctttttgtctgtctctgaacgctctttcgatttctcttttggcgtcttttcgttttaaatcttcgcgtttatcgtatgttttcttcccttttccgaggccgattaacactttggcgaaaccgtttttcaagtacagcttcagcggcacgagggaatagcctttctctttcgtcaggccgatcagcttattgatttctttcctgtgcatcaaaagctttctcgtccggagcgggtcgtggttatagcggtttccctgctcgtacgggctgatgtgcatgttgtggaggaacacttcgccgcgctcgattttcgcaaaggaatccttcatgtttacgcggccggcgcggatggacttaatctctgttccctgcagcacgatgcctgtttcataggtttcttctataaagtaatcatggtttgcttttttgttttgcgatagtactttgcctgatccttttggcatgccttatcctcctctctccgcaaaaaccgttcatgtgtgcgatacgctttattttagcaaatggagcgttccgcgacaatgaaaatgcggcttgcgaaagaaagcaaacagagcattttgccccatttgcttttcgcatttacttcttctttttgcgtttttgtttcggcgcgttttggaaaccgcgttttttctttttcttcttcggttttgtaaaccattcccctttttcctccgatttcggcggtgaagccggggtattgctgtttaacacgcgtttccgcgccggtctgccgcgttttctgcggtcgcctgtcgtttctctcggacggcgggtgcctttcatgccgacaatttcaaagtcgatgtttctctcatctttattgacgtcgacgactttgaccgtgatttcatctccgatccggtaaacgttgcccgtgcgttcgccgatcatggcgaaatgctgctcgtcaaaacggtaataatcatccgtcataaagctgacgtgcacaagaccttcaatcgtattcggcagctcgacaaacattccgaaattcgtgacggaactgatcatgccgtcaaattcctcgccgattttatcaagcatatattccgcttttttcagatcgtccgtttcccgctctgcatcaacggcgcgccgttccatcgttgacgtatggtcagcgatttccggaaggcgttcggcccacttttcttgagtcgcttcgtccgattgtccgttgatcaaatacgttctgatcagcctgtgaacgattaagtcaggatagcggcggatcggcgatgtgaagtgcgtataaaattcagtcgccagcccgaaatggcccaagctgtgcgggtcgtatttcgcctgcttcatggaacggagcatgacggttgaaatcaccgtttcttccggacggtcccgcacttcatcaagaatgctttgcagcgcgcgcggatgaatgtctccggcttttcctttaacgatataaccgaatgtcgtgacgaactccaagaacttttgcagtttttcggcgttcggctcttcgtgaatccggtaaataaacggcacgttcatccaatggaagtgctcggccaccgtttcgtttgcgacaagcatgaattcttcaatcagcttttccgctactgagcgctctctgatgacgacgtcttttacggcgccttcctcatcgacgagcactttcgcctctttgaaatcaaaatccacggcgccgcggtccatccgtttcgcccggagaatttccgccagacgttccatgtctttaaacatcgggacgagcggctcatatctttctttcagctcggcgtcgtcttctgtgagtatctggttgacatctgaataggtcattctttccgtcgttttaatgacgctttggaagatctcgtgctctgtcacctggccctgctggttgattgtcatttcgcaggaaagcgtcagccggtcgaccttcggatttaaagaacagattccgttagacagtctgtgcggaatcatcggaatgacccggtcaaccaagtacacgcttgtccctctttccagcgcttctttgtcaatcggggaattctccgtgacgtaatggctgacgtcggcaatatggacgccgagcttgtagctgccgttatcaagctttgtcacggtgacggcgtcatccagatccttcgcatccgcgccgtcaatggtgacaatgacctgatcgcggagatcacggcggtctttaatgtctttttcatcgatggtatcgggcgtgcttgttgcctgctccatcacgtcagccggaaaatctcccggcaggccgtgcttatggataattgataaaatatcgatgcccggatcatttttatggccgagtatttcaacgatttctccttcggcgttcattctgccttcagggtagcttgtcagtttgacgacgactttatggccttccgcagcgccgttattggcatgtttcggaataaaaatatcactcgtgattttcttatcatccgggatgacaaagccgaagcttttcgtttctgtgtatgtgcccacgacgcggtcgatgcttctttccaagatgcggatgaccgtgccttcctgtctcgatccgcttgactgggaattgagccgcaccatgacgatatcgccgttcatggccgtattcagctcattcggcggaataaacacgtcgcttaaagaggtatcctccggcaatagaaacgcgaatccctttgcatgcgcggaaatttttccttttactaaattcattttttccggaagcccgtagcggttgcttctggtgcggacgatctgtcccgtctcctcgagcgccaccagcgcttttaccagctctttaaattcatctgcttccgtgatgttcagcatctcctcaagttcctgaacggtaaggggcttgtacgcctcttccttcataaacgcgagaagacggtccataaacgcttctttttccattattcgacctcctgtttgttaccaatcgagtttctctaaaaattcgtacacatcctgatgaacgaggtcccgttctttatcgagcgtaatgacatgacctgattcttcataccatttcagctgtttgtcgtccgtttccacctcgttgtaaatgatgttcgcactttctgtattaatcatatggtcatgccgtgcctgaaccacaaatgtcggggaatagatcatgtcgacgtttttgcgcacatcggcaatcagctcctgaagcgatttgagcgtattcatcggtgttttttcaaactccttcatttccttttcaatctgctccggctgttttccttcgaattttttataattgcgcgcgtaggagagaactccttcgtacataacctcttcacttttaatgtgcatcggcgcacacataggaacaattccctttatgggtacagtgtaacccaatttcaatgaaaaaaccccgccaagcgacagtccgcaggccgcaatgttttcatagccttcagaccgtaaatattcataaccgtccatgacgtctttccaccaatcttcaggccctgtatgtaccagctcttccggcggaacgccgtgccctttatattgaggcgcgtgacaagtgtagccgcgctcattcaagtagcggccgagcattctgacgtctgccgtatttcccgtaaatccgtgcagcagaagcaccgctttgtctccgcctttaaatgtaaatggttttggtgtcacaattttcatgctcataaccccttttttgcacattcaatttagttttccacagttttgcgagaaacaaacgccgtctctcaacaagaaaaaggcctgatattaaatcagaccttatacaaacattgccttatacgatatacgccagcgaaatcgtcaacacgaaaaacaagactgccagcacaacggttgtgcggtgaagaatcagatcaaggccccttgctttctgttttccgaaaagctgctccgccccgcctgaaattgcacccgataaaccggcgcttttgctggtttgaagcaatacgacaataataagtgcaatactgacgatgaccaataaggtaatcaataatgtgtgcatcccatacacctccagactgactggcctacattgcttctattttacatgaaaaacaaaggcatgtcacgccgtatcggtgcacatcatgtcagaaaaacggaaatgcgtttgaaacttccatcatcattgacttttgtcaacaaagtcgtagtaaaaaagatcttcaaatttcatgtcaaagtaatagagcatttttccgatgaccagctggcccggcctccgctctccattcagtacacggctcagtgtggcgggagatattccgatctccagggcgagctggtttaacgagtagtcattattgaccatatactgcagcacataatctcttctgatctgtatcttttcgaccactttcttcaccttccgttctgtcaaatactttctttcttatacataagatacggcttttgttaacttttgtcaatacttttccagcctggctattccctttagtcaataaacatactagaatataaatagaccgcgggagggggagagactgtggaaagcttcgggaaacaattgcggacattgcgggaaaaaaggcatctgacagtgaaccagctggcaacgtattcaggcgtcagcgccgcgggaatctcgcggattgaaaacggcaaacgcggggtgccgaaacctgcaaccattaaaaagctcgcagatgcgttaaaaatcccgtatgaggaactgatgcagacggcgggatacatagagaccgttcaggaaacgagagccccgtacgacacgggctgcaccttgctggaaaaagccgaaacgtatgagctgcatgatttatccctattggagcgggagaactggcggcacctgtcgaaagaagacttggttctgcttgataaatactttgcgttcttatcggctgaagccaaaaaaagaacaaatgaagactcatgactttgcacatgtgaggcgatcttattgaacacattcggaaagcaattaagagagctgcgccgcgcccggaagcttaccgtcaatcagcttgccgtctattccggcgtcagttcggcgaccatttccagaattgaaaacgggcaccgcggcattcctaaacccgcgaccatccgaaaattggcggacacattaaaaattccgtacgaggagttaatggcgcgggccggacacatcaaggcatttcaggaagaaatccgcgaaacctccgaaagctatcaatccatctgcgccatctatcagaccgccgttgacagaggcgcggagcatctgccgctgtttgacagcaaaaagtggcagcatttcacaaaagaagatattgaaagcgtcagcaaatactttgattttatcgcggctgaagcgaaaaagcgctccccggattcctcatcctctttttgatcctctcctcaacttaacaagcgccagacgtacgttccctccgattttgcggtataatagcagaagacgaggtgaaaaagcatgaaccaatcagaaatgtgccccagattcgaaaaagcggtcgacatcctaagtaaacgctgggtggctctaatcgtctttcagttattgaacggacagcagcgatttagcgaaattgaagcggcgcttccgaatttaagcggaagagtcttgtcagaacgtctgaaagaacttgaaacagaaggtgtcatcaaacgggatgttatccccgaaacgcctgtccgcattgagtattctttaacggaaaaaggctgcgcattagcccctattttagaggaaatttccaagtggtcttcaacatggattgatccttcctgataaactcttttccgcataagcggctgatctttcaaacggacagccgtttttatttttgcttttcttaaacagaaaaacaagccctcaggcgtgcagggcttgtttttgtctgacgccttccagcggaattcgaatctccgcccgggctcctccagactcctgattttcaagtattaattcgccgtggtgaagatgtacgacatgatgggcgaatgtaagccccatgccgtgatgccccgccgaatgtctgcttttatcctccgtgtaaaaaagctgtgtcgctcttttcagcgcttccggcgagaacccgcttccgctgtcggatacggcgagatggagggcggaatcgttgcacaggacgtccacacggatttcccctccttccggcgtatagtcgacggcatttgccgcgatattcatgaccgccctgtggagcagctcatgatcgatcggcgcttcttttctgtcaattccccgttcgctgagaacgagatcaatctgcttcggccccgcaagcgccgccgcgtcacgatatatgttttgaatccactctttgaggtcggtatattccacatgaacggcaactgcctcctccgctttagaaagctggatcagctgtccgacataatgctcgattttgtttccggcatccagaatatactgcgcatattccgcctgctcctcatcaggctctgttaactgaagcagctcggcatttcctttaatgatcgttgccggaattttaatatcatgcgcaagcgcgccgatttgttctttcttaatccgctccgcctcccattgcgccgccagagatgcctgaagcgcgtctttcattttcagcagagagtcaatgacatcgtcaaattcttttatacgcgacctttttggattgatatttaaattctgtttttgaatgcttgccgtaatggagctgagtgtgctgaaatgccgtctcagctgattggcgaaacgcgtcgtcacaataaaaacggtcaaaagaagcaaagtgatcagaattgtaagacccgtccattcataattcggcagatagcgccttaacagcggcgactgaaattccgacctgagtgaatattggagaacgccgtattcatctttccgatttatcaccatgaatcctttttgagcataattaaaatacggctgatgctgaatcttttttctggcgttggctgcatcttgttccgtcatcgttccttttgtcatccgctttgtttttttatcaaaaacggcgtatgtcatacctgcggggatcatgtcttctgttatcttttccgctgatttcaggcggggtttgatctgttccgcctcatgctcgctgtagtttgcgggcaggatcgctccggcattcatagcaatggcatttaaggcgacacataatgccgccacccccatcgtgctcagacacagtgtgatcgtaaatttgacaagctctttgcggatgctggattttccttttgctattcccatttgtatccgacaccccacaccgttttgatcggatcagccccgtgttctttacattttttccggatggttctgataaactccgtaatggttgaatagagcgcatcgccgtccaagccgtacacttcctcgtaaatctgctcccgtgagaatgttctgtttttatgctgtgccagacattcaacgattttatattcgtttttcgtaagaggcagtttccggtcatcaatccatacttctttattgtcaaaatcaaacatgaagcctgatatcagccgtttcgtctgatgcttttcccgccgttcccttctgacatgcgcgtttacccttgccatcaattcctgtacgccgaacggctttgtgatgtaatcatcagcgcctgtcatgaggcctttcacaatggattcttcgtcagactttgccgttaaaaacaggatcgggctgtccaccagcggccgaatcctccggcagagttcaatcccgtcggttccgggcatcatgacatcaagaagaatcaaatcatagccttgaaaaaaatccaatgactgatcctccgctttttccagaatcgttactgtatgctgatcacgctgtaaaatgtttctgatcagaacgagaatatctttttcatcatcaattgctaaaatgtttgccaccggccgaatcgctccttgcctttattcatatgaacgccgcccttcccatcttctgcaccaatagaggccggccagacataatatcactatagaaaaatataacattatttctccgaatctcatatcgtatcttacataagggaggaactcttttttgactttgtcaaaatgcagcagtcctgcaaggcctgaaagccgtacgctccatgcccacgggaaaaaacgccagatggtatcgccaagtcccgtattcatgagcgccgccattaataatcccgcaccccctaaaagcccggacggtcccatgccgtactttatgccgacaaaaaaagacatcatataaagcggtatactgccggcaatcagccacgcccctccttttaaaaagagaagatacgggagatcattgatgtgaagaacaaatttcatccccgccaaataaagacagacggcgagacctgccgataacacattcaatagaagcagcagaagcagcttgcccgcaaaactgatgattttagaatgcggaaccgccagcatcatctgaaaatggcccgcctgttcctcaatcgaggcagacatgccgcagacaatactgatgatgaaagggtataaaacggcaatcgcgctgaaaaacacactgtacagcatataaggctcctgaacccttccatacatatacaacaggaaaaatcccgcgcataaaaccggcgccgcagcatgcatccatatgagcggcgtacgcttcatttttaatacatcggcccacatatatcgtaaaagcacggtcatgaccggtttcccccttttgaaaaagacacggcggaaacaaaacttattgcgataaaagaaagaatagaaagaataatagccggaatgatcacgtttccgtttaataagccgctgtttgcgggaagcggaattccgttcggatggatcccgagaatcggtgacatcagccggactgaccagctccatggactcagccaccacaatgagcctgacgccggcacaatgcctaaaacaaaggcggcgatcatattcacgagaatgactgccgtaaacccgaactgtctggcaatccataagcagaacggaatttcccaaagcgtagacagccacaaaagggaacttgcttcaatacctttcagctgaaccgcagcaattgccggaaacacaaggccaagaaaaaacatgatgactaaaaagacgatttgcgacaggagtgaatacagcgcgatcaagcttatttttgagaaccatatgctcttcaagtcagccggcagtgagtacaccgcgcggtcattcgctgattttttctcttttttaacagataaaccgcacattagagcaatcatgagcggcatgaaaataaccgcccaccaattgaacgtgcccgtcataaaataagccgtattcagcagaaaagaaaaagccgtgtttagaagcggaatcagaatgatcagctttctgataaatgttcttttagatgtaaggtgttccgcctgcatgtactgaatcatttcccagtccccgctttctcccgtgtcgatttgacaacctccagaaacagccgctccagatcgtcttcccggctgatttctccctgatatcctaaaacgccgtcactgatgattccgatatggtctgcgatctgctcgacttctgataacaggtggcttgataaaataaccgttattccctgtccgggcagggagcggataaattcccgcaaatcctgaattcccatcgggtccaatccgtttgtcggctcatcaagaattaaaagcgacggacggtttaataatgctaacgcaatgccgagacgctgtttcatccccatggaaaattgtccggcacgcttttttccggttcccgttaatcccgtgatttccaacacttccgcaatccttgaatcaggcagtccgagcatcacgcagcggactttcagattttcagcggctgtcaggttgctgtaaagcggcggcgcttcaatcagggaaccgatgcttttcaaatcttcgcgcttccatgtatgtccgtcgaacagaacttcgccggatgtttgctgcagcatgccggtcaatattttaagtgtcgttgattttcccgcgccgttcggaccgagcaggccgtaaatactgtttcgcttaaccgatagagacacatcagccactgcctgttgtctgccgaatgatttttgcagctgtctcgtttctaagatgttgctcatatgattacccctctgctttgttatttgataagtaagactttacagcgcagttatcaaaatttaatcaagaaatcaaaaaaagcatccttcacgcggaagaatgctttttttcatgaggctgagcgtacgatcagctttcttttttgttttttcaccgggctgagggctcgttccagccacgccatcagcaggtctgcggctaccgccatcagcgcggtcgggatggcgcccgccaaaataatggcggttccgtttgtcgcgttcgaccctctgacgatcatatccccgaggccgcccgcgccgacgaaagttccgatcgctgtgatgccgatggcaatgacgagcgccgttcggagacccgccataatgacggaaagcgcaagcggcagctccaccatacgaaggatttggtatttcgtcatgcccatcgcttttcccgactcgagataagcgtgctcgatattgataatgcccgtgtgcgtatttctgagaatcggcagcagtgaatacaaaaacaaagccgtgatgaccgtattggcgccgagtcccatgacgagcatcaggacggcgagcatcgcaagcgccggaacggtttgaatcacgttcgccgcagcaaacacccagccggcgagacgcccgtgccttgctgtcacaattccggccggaatggcgaaaatggcggcgaaaacgacgccgtacgccgacatgagaaagtgccgccagcactcatacagaacataactgccgttttgagcataatacgtaaacagctccttcatcgtgtccatccgcacatctcctttccgttattcaaagtaatgatgtttttctaaatattccttggccacgacggacggctcttttaatcggccgtcaacttcgtaattcattttctgcatcatctttgtatcaatcgcgccgatcattttattgatcacgccctccagttcgggatgctcttttaatacttgatccggaacgacgggtgaacagtcatacggaggaaagaaccgcttatcatccttcagcgttttcagtccgtaagcgatgattcttccgtcggtggaataagcgagcgcgatatccatctttctgcttttcagcgcgtcgtaaacaaggccgatctgcatcggatacgtgccttcaaatgacattccgtatgtgttcataaaatcctgatatccgttgcctctcagcttcatccagtagttatcgacgccgaatttcagatgagacgcttcttttttgacatcggataccgattctaaatggtacttgcgggcaagctgtccggaaacggtaaagacgtatgtattatcaaagccgtaagaatcaaaccatttcatgtcatatctgttttgaaattcacgctgaacgagccgcagcgctttgtccgggtctttttccggctccatgcgaagcgtcccggtcagcgcgtctcctgtatagcgcgtcgcggcgatatcaatatcaccgtttatcaaggattgctgctgtacggcgttggagccgagatttttaataaccgttgtcttcaacccgctgtgatgttcgatcatctgtccgagcatgctcgcgatgatttctgattcggtcatgctttgcgcgccgattttgatggtatcctccgatgcggcgctcaatcccgggagcgagcatccgccaaggagcagcatgccgatacaggcgattgcgagcagccgttttttgcatctattccccatgagagacctcctccttatgaagcatcctttatgcttttcagcccgtcaggcgtgactttccgttctgtcatccccagcatgtaatcgacggctgccgcaagcactgtgaccggaacggcgcctgcgataatatactccggctgataaaggtttaagccgataaaaatgtaatctcccagcccgcctccgccgataaaggaggcgagcgtcgcccagccgattaaataaatcgaagacgtcctgatgcccgccatgatgaccggagcggcaagcgggagttctacaaacctgatctgctcccatgccgtcatgccgattccttttcccgattccagaagatgccgattgacgccgagaatccccgtatacgtgtttctgagaatcggcagcatggaatagaaaaacagcgccgcaacggccgggatctttcctacgcctaaaagcggaataaaaaacgcaagaatggcaaggctcggcaaggtttgaatgatgttgacgatgccgatgacggcgccggctcctcttttcatcctcgtcagcacgacgccgagcggaacggcggcgagaatgcccgccatgacggcgattaatgagatgtacagatgctcccatgttttataaagcatctctcctccatttgcctgtaaaaattgcacggtctgattcatatcaattgaagcctcctcatgacatcaccgcgagctgattctcttctccccagatggagtcatagacgatgtcaacgaggcttgcccttgtcacgattcccgttagccggccggcttcatcaaggaccggcacaaatttcatgcctctttttaaaattttatggacggcgtcgcggagcagagtgccgcttctgaccgtgtacagatcccggtcaagcacttccgcgacggttaccgcttgtcttcgtttgcggtcaatcatctccacatcgacataaccttggagaacgttcttttcatcaatgacgagcagcgaatccacccgctcggcacgcatcagctgaatggcggctgacagtgttttctcaggtgttaccgtcacgggatcgggattcatgatctgctccacccgttcaatatcagggctggatgattggatcagccgttccttgccgataaactcctcaacaaattcattcgccggaaatctgagaatctcatcaggcgttccggcctggacgatttctcccgctttcagaatgacgattctgtccgcaagcttgatggcttcgtccatatcatgggtaacaaatacgatggttttatgtaaggttttttgcagttttttaaattcttcctgaagggaatctctcgtaatcgggtcaagcgccccgaacggttcatccattaagatgagcggcggctctgcggcaagtgcccgtaatacacctattcgctgctgctgtcctccgctcagttcatgagggtaacggtctaaatattcaggccccatatcaacgagctttaaaagctcccgcgcccgttccttccgtttttcggcaggatgctttaaaagcttcggaacgagcgtaatgttctgctgaatggtcatatgcggaaacagcccgatctgctggatgacatagccgatgcttcttctgagttccaccgggtcttgttccataatgtttcggccttctatcaggattctgccttctgtcggttcaattaagcggttgatcattttcatcgtcgtcgttttgccgcagccgctcggcccgataaaacaaataaattcgcctttggcgatattcaggttgatgctgttgacggcttttttcccgcctttatacattttcgagacattttctaatgtcagcaaacactcacacctccacgattaagtttattcaattcgttaaattcaaatttaacttttcagacaattgaacgttttccattataaattaaactttgtaaattaaaaagtttacaatttgtccatattatatataaaggttgtgtaagcactgattaacccgtattgaccggcaaagttcttcttattgctccggattactgccaaattctctcggaagagcatttccgccggtttaaaaatgtggtatattgacatcggaattgctgactgaaaggattgaaactgttggagaaagatccgttacacgtaatcgaacaagctgaagatcatttgatagaacgaatcgctgaaaatatgcatacattcggaatgcccgcgacggtggggcgcattttaggcattatttatatgaaccgcaagccgatgaccttaactgaattatcagaagcgaccggcatgagcaagacgagaatgagtcaggcggtccgtgaaatgcttgacgtcaatctggcggaaaaagtgtttgaaaaaggcgtccgcaaagatttatacgacgtcgagcaggattattaccaaacctttattacgctgtttacggccacatggagcaaggtcgtcagcaaaaataaaatgatgcataaaaagctgaaccgcgaactgacagccgtccttgaaaacggcgtaccggaagaagctgaggaaaaaatcaacgaactgctgaaagaattaaaggattggcttgattactacaactggatcagccgcctgatcgaattttttgaaagcgaagaaattttcaagcatgttccgaagccataagaaaaaaacgccctgacccgcaaggcgttttttttcatgccgcattcggcgctttggttcgttttttctttctcaccggactcagcgcccgctccagccacgccatcacaagatctgcgataacggccatcagcgctgtcggaatggcgccggccaaaataatcgcggttccgttcgtggcgtttgagcccctgacaatgatgtcaccgagcccgcccgcgccgacaaacgtaccgattgccgtaatgccgatcgcgatgacgagcgccgtccgcagccccgccatgatgacggaaagcgcaagcggcagctccaccatgcggagcacctgaaatttggtcatgcccatcgcttttcccgattcaagataagcgtgttcaatactggcgattcccgtgtacgtattccggatgatcggaagaagcgaatataaaaacagcgacaatatcaccgtattggcgccgagccccatgactagcatcagcaccgcaagcatcgcaagcgccggcacggtctgaatcacgtttgtcaccgcgaatacccagccgcttaatgttctgtgcctggcaatgaagatgccgagcggaaccccaacgatcgccgcaaataaaacgccgtataccgacatgagaaaatggcggtaaaactcctgaagcacataggcgccgttttgagaataataagtgccgagctgctgcagcacttccatttgccccacctcatttcttattcaaaataatgatgtttctccaaaaattctttagcgacgacggacggttctttcagcttgccgtccacctcgtaattcaattcctgcatcgtttccgtatcgattttgccgatcagtttattcacaatgcccttcagttcaggatgctgcttcagcacgctgtcgggaatgaccggcgaacagtcatacggcgggaaaaattgcttgtcgtcttttaaaattttcagatcgtacgctttaatccgtccgtccgttgaataagcgaggacggcgtccattttcccgtttttcacggcatcgtatacaagtccgatctgcatcggataggttgtgccgaattcaaaaccgtacgtgtcggtaaagcctttatagccgtcaccttttcttttcagccacgcattgtctacaccgagcttaaattgatccgcatgcttcttaatatcggacactttgtctaaatggtctttttccgcaagctctttcgtgacggtaaaagcgtatgtgttctcaaatccgtaagaatcaaaccatttgtaatggaagcgtttctcaaattctttctgtacgatggataatgcttttttcgggtctttttccgcttccatgccgagggtgctcgttaaatccgttcccgagtagcgcgtcgcggcgatatcgatttcaccgccgagcatcgcttgctgctggacatagttcgatccgaggtttttaattaatgccgtattcaagtctgtattgtgctcaatcatctgtgcgatcatattggcgataatttctgattccgtcatgctttgcgccccgattttaatcgtatcatcggaagccccgctcaggccgggaagggaacagccgcctagaagcagagcagctgacagcgccagtgcgcacatccatctcttttggttttttttcaaaacagccaactccttatgatacttccttcagtcctttcagccctttcggcgtcaccttccgttccgtcgccgctagcagataatcaatgataatggctaaaatggtgaccggcacggcgccgccgataatatattcaggctgatagagattcaggccgataaaaatatagtctccgagcccgccgcccccgataaaggaagcaagcgtcgcccagccgatcagataaatggtggatgtgcggatgcccgccatgatcaccggaaccgcaagcggcagttccacaagcctgatctgctcccagaccgtcatgccgatgccttttcccgattccagcagatttttgtttacgccttgaatgccggtatacgtgttcctgagaatcggcagcaccgaatagaaaaacagcgcgacgatcgcgggcacctttcccacgcctaacagcgggataaaaaacgccagtatcgcgagactcggcaaggtctgcacaatgttgacggcgccgatgacggcgcctgcgccctttttcattctcgtcagcgccactccgagcggaacggcgacgacaatgcctaatatgacggcgatgatcgaaatgtataaatgctcccacgttttatataacagttctccgccgttcgtctgcaaaaacttaatcatttcattcattgtaagcgttcctccccttgtcagcctgtcaccagctggtcttcctcgccccagattgaatcgtaaacgatgtcgacaaggctcgctctcgtgacaattccgactaaatgcctttgttcatcaacgacgggtacatatttcattccgcgctttaaaattttgcgtacggtatcgcgcagcagtgtcccctgctcgactgtatacagatcagagcggagcacgtcgccgacgaggctcgcttttttccggttctgatcaatgatctcgacatccacatacccttgcagcacattcagatcatcaacgacaagcagggaatcgacacggtgctcccgcatcacctgtatcgcctgtgaaagcgttttgtccgccgtaacggtgacaggctttttattcatcatctgctcgacgcgttcaatatccggtcttgattgcaataaccgttctttgccgataaattcttcgacaaactcattagccggattccggagaatgtcatcaggagtgccggcctgaacgatctctcccgcttttaaaatgacgagccggtcagccagcttaatggcttcatccatatcgtgggttacaaacacaatcgttttattcaatgttctttgcagttttttgaattcttcctgaagggaatcccgcgtaatcgggtcaagcgctccgaacggttcatccatgagaataaggggaggttccgctgcaagggcgcgcagcacgccgattctctgctgctgtcccccgctcagctcgtgaggatagcggtctaaatattccgggcccatatcgacgagcttcaaaagctcccgcgcccgttccttccgcttttgttccggccatttcagcagtttcggcacgagggaaatgttctgctgaatggtcatatgagggaaaagtccgatctgctgaatgacgtagccgattttccgtctcagctccaccgggtcctgctccataatgttttcgccatcgataaaaatctttccggatgacggctcaatcagtctgttaatcattttcatcgtcgtcgtttttccgcagccgctcggcccgataaaacaaataaactcgcctttttcgatatttaaatcaatgctgttgacagctttttttccgcctttatagacttttgatacattttctaatctcagcaatccgtgcacctccgaagggttccgttatttttctgaaaagtataatctttattataagatgaaatttgtaaaataaaaagtttacaatgtgttgaaattatatacaatatacgtattttttcatgttatcccgctgacaatgcggatgttcttacaatcgctcccgatagctcgcatatcctgccgcatcatctttttcatcaactgtaaaaaatatgatatattgtcagcatgaaaagccagtgaagggatgatcagccgtggaaaaaaacgctcttgatatcatcgggcatgctgaagagcatctcattgagagaatcgccgagaatatgcatacattcggaatgccggccacattgggacgtgtgctcggtattatttatatgaaccgcaagccgatgacgttaaatgagctgtcagaggcgaccgggatgagcaaaacgaggatgagccaggtggtccgcgaaatgaccgatgtcaatctggctgaaaaagtgtttgaaaaaggcgttcgcaaagacctttatgacgtcgagcgtgattattaccagacgtttatctccctgtttacggcaaattggacaaaagcggtcagcaaaaacaaaatgctctataaaaagctgaaccgcgagctgactgagcttctggaatcgaaaaatctcagtcccgatattgaagaaaaagcccgtcagcttttggatgaactgacggattggctccattattatgactggctgagccgtttgatagaattttttgagagtgaagaagtgtttcagcatgtgccgaaaatagaaaaaagcagcacccgaagataaccgggcgctgcttttttaagtcaggaaaccaatatcgggaacatgcctttcagaccggcgccgatcatgccgatggccaccaccgccaaaatcagccccatcagtcgggtaatgacgttcatttcggttttcccgagcttattgctgatgaaagatgaatagtgaaagaagatgaacgtcatcgcgatgacggccgcaatgccgataagcacgctgatgtaatggaagatgccgccatggccggccgacagactcatcaccgtcgcgatcgtaccgggtccggcgataatcggaatcgacaaaggcgtcacagatatatcggctttctccttgctctcccctttctcttcatgatggagagactgtacatgagatttcttcgcgttcagaagattataagcgatgccgaaaataaaaatgccgcccgcgatacgtaaggcatgaatgttaatgtcaaacagtttaaagatcagatggccgaagattaaaaaagccgccaagatgataaacgacagcacggaagccttgcgcgcgatcgctgtccgttctttctccgagtacccttccgtcagtgaaagaaaaatcggcacgtttccgatgggattggagactgcaaacagtgaaatgaagacatgaatgatgaatgaaaacatgcgtacctccttatgacttgccgttattgagttatgttttgttctccgctgtttcttatgcatggtttttaccccggggtctgctttttataacctcagccggacaatccggaaacagaaaaaccgtccttgtaaggacggttttttctgtttgctatctccataagccttttccgaatttcaacagccgataaagcattttcaatttttttagcatgcgttaatttcctttttcactctgaatcaatgcgccgagagacatgatatctatcagctccaataaaattctaccataaagggtactttttctctattatcaattcatagagaaggtgatttgtatatctttagaaaactccgttacatccgtcctattttcttttataatgtaaatattgaacaaaatccctatattacttgtaaaaggagttttagaatgtattgttctcaatgcggccatcatactgatggcggaaagttttgtgaaaagtgcggggcgccccagcccgggcagggaggcgcaggccaaacgcaaggccaggccgctcaggccggcgccgcggctaagcaggcttcaaagcaatttgccttattcgtgcttgatgtgttaaagcaaccgtatcaaacatgtaaaacgacaggcggcgaacagcttgtcagcagcatcatcaacatggtgcttttctgcctggtgacgccgattatgttttatattctcttatcagacggctttcgtgacgtcagttttaccgcgattgtgatcaaaccggcgcttacctttgcattatgcgttttttgcctgtatctcttgacttttatcgctttgaaggccggcggcgcgcaggtgtcatttaaagattcgctgtccagattcggggcatttttgattccgtttacagctattttgcttcttgccctcatttttatgctgcttcatacaaccgtttgcttcaccattctggctgtcggtcttttaggagcggcgtttgccgtgcctccgctcatgctggcgagctatcagcatcagctcactactaaggcggatatcatttattctgttatcgtcatctatttgatcatttgcgtaacgtttcaattcacgatcaagcattatataaaagaactcatgaattatttcttcttttaaaaacggaaacccccgccgcctgattggcgcgggggtttattttattgaatggatgttaaataaattcttccgtctttaacaatgccgccatacgtccaattgtatgttctgagcttcggactgccgccggctttcgtaatataaaactcctcgtacgtatgaatcgtcagatgagagcctttctgtgaaaagcttttgacattcacttcattaaatacttcggtcgtcccctcgctgtgcagttttttgaccagtttctgctgatcagcatacaaagggcttccctcttctaaattaccctccatgatcgcgaaattgttaaggctgacggcgcttgattggtttgtcaggtaatcagtcataaacgatgtgacttgttcattcgtgaggctgcctgaagctgtatttcctttggatgatgcccatgcggatgtataggttttcggctggtcgttttttattttttttacatttgtcccagaagaatctgaggcagggtcagctttttcgaaaacccattttttatgttttgtatcatatgagagtacatagtgaaagctcggctcagcctcttccatatcaggcttcgtattcccgtcgaaataagcagactcatgaagctctttacccgtaacagttacttgccagcggccgttctcttgagaaatcgcaaatgaatccagatcaaagcttgtctctttatactgatccttcaaaaaggtgccggaactcttcatgccggataccacttctttcgtctgctctttccaggcggaaccagcctcggtcatctgatcggtatttccgtctgccatcgcttttgtatactgcttcgttgttttgacaatcgtgtccatgattgtttgttgtgtatcttgatccgggataagcgttaagtccacatcagtactgttgatcgggacatcggcagttttcattttcccccaaggaaaatcagcctccacggcggctgtcatggaaccgtcagttaagagcggaccatatgtaacggatgtaaacggatctttatggacagacttgccgtttatcagcagatcgcctttcgcgcttttgaagctgtctgccggagtgaatgtcacatcctcggcgtctaacggcaggtcaaactcaacattccggctgccggccgcctctgcctcttgctttttgacaacgtcaaccgtctcatttttaagcttggcttccgccgtgtagacaccgggtgcatacgggccgaagatttgggtttcatcggcttttttgaccgtacctgttttctcgctgttgatataaagatcggcgcctttataattgcttgtgacccggaaataaaccggatcgactttcagttcgtaatggtcaaacaaaagaagggtttttccctcttttttgacgtataccgcatctgtttctgatgaattgccgcgaagcgatgccagcagttcatcgtgtttctttgcgtatgcaaggagcggtttgacattggtctcattcagcttcagttttttgtctgaaggagtgagcagggctgcgagctttttcgtgtccccgtcatgaaccgcctgttcgaattgatccgtgagccttttttcagatgtcagccaggctccggttttatatgcggcaatcaataagatcagcgctgcggcaatgccgccccacatgaagagcgtttttttagggatcggctttctcatttgtgaagcaggttcagccgcttttacagccgcctgccgctccagccggcttcctttcccgatcggttttccgcattctttacagaaatgcgcttcttcattgttctgctggccgcaatgcttacaaaaaaacatgactttcctcctattcaatctgcaaaacttgtataacttttcctatgtttcatattttataataaagtagaatgattttggagttattttcaaaaatagctgtcgatcataacagaggaggagaaacggacatgcaaaaactgagcatccgaaaagccgcggagccggatgaagcactgtatgaactattgctgctggccgatccgtcgaaagagattgtcgatgattatcttgtaagaggagaatgctatacggcctggacgtcagacgagcttgcaggggtttacgttttattgcaaacaaggcctaaaacgatagaaatcgtaaacatcgcggtaaaagaatcgctgcagaacaggggattcggaaaacagctggtgcgggatgccattgaaaaagcgagacaatcgggggctgacacgattgaaatcggcaccggaaattccagtattcatcagctgtcactctatcaaaaatgcggattccgcattcaggctgtcgaccatgatttttttatcagacattatgatgatgacatttttgaaaacggcattcaatgccgggatatgatacggctttatttggatttatgataaaaagggcgccggctgacatcggcgccccttcgtttaccattcagacggattgatccgcttgtttctctgtatttctttgactcccttgtctgactgaaaaaatagcaaaaacgatcgtaagggtcagtccgaccgccgcaaaaatataatccgcattcatcaacagcagaagccctgtgtagacagcggccgacagcggttcacccattttgacaatggaaaaaatcagtgcaaagacccttccgaaatatgcggccggaaccgtcttttggaaatacagcaccgtttgcacatcaatatacgagatgatgatgccaagcaccaggaagatgatgcactcaaacccatgaaggggaaaaaacaggagcataatgagcagtcccgctgccgttaacgtccgcgggtacagccggttcaagcgttttgtattccatttgaaaaatacggccagattgcccaaaagcatccccgcctgaaacattgaatacatgacggcaaaccatacagaatagttctgctgaaaacgctccacagcaagaatcggccccattactgaaataaggccggcaatgacgagatttacgatgaaaaagtatccgaccgatgtcagccatgccgcatttcctttcagcattctgtaaccggcttttacatcttcagttccgttgcttttttcatcgggctgttctgaaatacgaatgaacgcgataaatgccgcagagatcaaaaaagcagtgccgtttagggcaaacagcatcccgaacggaatagccgcaatcatgatcccgctgatcaattttccgacgatgagtccgatcaagtcactcgtattgatcagagatgtcgcctgatcaagatgctgtttgcggacgagcagcggaatgatcgcgactttcgccggcgcaaacagcatcgattgcagagatagacaaaaggcgcacaccccggctatccacacggttaataaatcgttcgcgctgagcaccgccaagaggatcataatggcggcccgacccgtattgcacaaatacaagatcgacttttttcggaataaatcaatcagcggccccgccagcacgccaaatgtcaagggcacgagttcgataaaagaaataacgccgactagaattttgctgccggtcaattccagcactaacagcggcagagcaatgagccagaccccgtccgctgctgaagaaaacacctgtgcacaccaaagctttgcatagttcggtgttcgatatgtcatatcaggcccttttttgatcctcgtcatcagatacaccgccgaaccattccagcgttctccatgattcccgtctttccgtataatcctcttccatcacctcaaatacaatgccggtatcttgattccgataaagctcctgcaaagtatcggcagcccgtctcagcagctcctcagcgattgtcccttcactcggatggcggccctcaaaacagcggacgcccccatgcgggaacgcaagctggcgaaatgagctgaagtgataatgcttaatgctctcttttatcgacagaaactgaaagaaatcgggatatttcagctgatcatttctgaacataagcgcggaagataagtgagtctgataggtaatcgcccaatggcacagatcccacgtaataccgacatgcttcagatccaactgcaccagctctgtaaaatcctcaggataaatgaaaatcggatcaaaatcctctcccagattcccgatgatcggaaggttttccacaccgatccaaatgtccgtccctttcagccgctcatcaaactccgcgaaaaactcaacgatttttttacggtttccttccaggtcatagacttgaaattcctcaaccgtcataaattgattggcatgaacggttatgcctttggcgccgtatttcacagcgagctccgcaaagtgataaagctgttttttgatgtgatcttcattcacataatcggcatgatctgtcggaaaatgcagcgttaataatgaaggatcaagctgtttcgcatattccagcgtctgattgaatgttttgagataatccgcttcctcaaaggaatggccgtcaaaaatattcgcttccagaccgtatcccgcttccacccatttctcatcgatttgcttcggatcaagtccgaaaaacggaatttgagcaatcataggacagtcaccatgttcctctcacaagcataaacgcttccgcagccgaaaaacccgcttttgctccccacacacgggcattatgttcgatcgcctgcaaagagcggggatgagggaagtctctgagctcggaaccgtaacacgccatcgatttcaatttcgtttcaagctcgtcttcaatattaacgaagaaattggcatgaaactgatccttctgacagtaattccattccgtcgaagacaatgtttcataggcaaaaacccgttttaccgtatgaccgggaagcggacgggttgccgtcatgaccgctctgaatacgacggagtggtcaatattaatgtcaccgccgtactgggtatacacaatgtcaggctgaaaacgattgatttgtttctccgcttccttcacgacatccagcaaatccattgaatccattctgttatcaggaaggttcagcctgacaaaatcatggatgcccaaagtgctgagcgcctgctccgtttcttgattagaatgctccataacggaatcttcaggctttttgtaatccgtttttcttgatgatttgccttccgccataatgactgccgacacgctgtcaccttggcggacatgtttggcgagcgtgccgccgacgccgataatttcatcgtcgggatgcgctgcaaataccattactttcatcatattgccctcctttaactaacatttcggctgtatccgctccgcagttcatcagcatatcaagcatggagaggtgagggatatgctccccgaataattgaggatagccaaaatgtcggatctgctgatactcaatgacaattccgtttctttcaaaatcgctttctattaaatagtcggaaccctgactgcctgaataataacggtccgcccccagctcctgacaaagcgctaaaacaaaatcgctttttttctccttccggcattcaagctcagagacataacagagcggcgtttcaattcggagctcttttcggaaaaattcaatgatgtgcatattcaaatcatggagatattcccactcccgctgatagacatcttgaaaaaaatgctggtatcgctcaaaatagggagctttcgcatagttcattttaatcgccatccaatgttttttccgccaatcctgtgtctggtcgattttcatatgccgaagctctatgtctttatattgtttcatctgcaaaggcactgtcagccatctggggccttgcggcgttttgattctgttgcggttgagaaatccttttttctcaaattgagctgtgtcatgaatggcaaacagatccgacttatacattttttcaaaaaaaccgtaccacggcagataactggattgatggccgcttattgttttcattccggtttcgtaaaaagtcggcattgtttttcttcagctccccaatatcgtttcggtcttgcgatttctttactgtgtgaatagccaaaatcagcccattgaagcttgcggcaaatggcgaattgcagggcgtcacgcatcaataagtaagaggcctgcgctttttttcccgccaggctgtttacattctgccaataatagaaatgagagcggtcatagagaaaaatactgctgctgatcagcgtctcatcctgatatgctccgatccaaaacattcggtccgcaaacgtgtcaagcagcttttggaaaaagccctggctcagcacataagccgcgccgattgccgatgtatgctctttgtagaggtcataaaacgcgccaagttcttttcgcccgatcagccgggtgacaatattctctttttcagcgtatctgactgctgtccgggcttttccggaaatgcccgtccaaagctcgtcaaacgtgtccggaagcgaaagaatccgtgtcgccttttccgtccatccttccctgatttcttctgtaaaagaagtctgaccgtacggcagcagcatccgggatatgttccggccgaatatggcctggatttcactttgaagccattcaaatgagatggggcgatctgaaataacgccgccgtatccgatcatattgccggataatacgcccttctgttcaaaaagcggaagatagatgacctgtcctccgtccgttgtcagtctgacagggtgaaatgacgtgccgggaagctcttccatgaggattccccaatcatagctttgaaacaatcccgcctgatacatgtcagcggcccgatcccatgcctggcgggtcgtgcatactgctgttttttgcatatttatcaccactattcagtcttattctgttgctcacaatatgataaaacggattcggctatatatctgacttgctccttttgaagaggaggtttaaacggcagggaaagaactctcttccaaagcgggtcttccccgccttcccccgcgtatgtttcataaatcggaatacgttcgaggggaagatagttccagcatgtttggatgcctctttcggctaaataaacggaacacccgtaccgctcttcatcccggggaaatacaattgttaaataattcagatgttctccttcttggggctggatcattcttatgccgtttgtttctcccgcctttgcaaagatttctcccgccgtctctatgtttcggagcgaagctgttacaagctgatccatacgtgaaagctgatcatcaataatggcttcccttgccggatgcatgcgaagcacgggtacaacagccggtttatccggcagagtttcgagctttgtggctttcatggaaggcatggcgcccgcttttctaaacatatatgaaataggatgatgccgtttccgtttcattacagcttggattctttgatttctgatatagattcgatagtcagctgccacttggctgcgctgttccatcgggagatttgctttttgccgaagccattctttcggcgcgattaacgcgccgcctccgatactcgcaagcggctttgaggggccgaagcttaaaatgccgaaatcgcccaaaccgccggcaaatgtatccgcttgttttgtaaacatggcttgagcggcatcatcaatgacagcaattccgttttccttcgcccagttaatgatagcggtattttctctccggccgtatacatgtgtgaggataaccgcacacgtacgcctcgtcgctttttttttgacatcctcaaaagataaggatagatgctcatccagctgcgcaaacacaggcgtcgcaccggattgcagcacggcatcaatgacattcgggcagctgaaggatgagaaaatcacttctttccccggtccggcccccgaataagttaatgcgagcaccagtgccgcactgccgctggaggtcagcacgaccccttttccgtaacgtttttccagtttttcagtcagtccgctttgtccggcagtaagcaagtgcttcaccgcgcgcagacggccgctgactgaaaactgacccggataaatgggatacttgatctcttccgggtttttaggaaagtgaaagtttgtgcttttgtctttcatcttttatgatctccaggccttcattcagacttactttcggagcgtaaccgagcaaacgtttcgccttctcgattgacggcgcccgtttaaaaatctcgatgtcttttcccctcacgccgtcttcgcccagctttttatacagatagttatccttctctctgcctgagagcacattgactttttcagccagttcttttatcgtgatcggctggtcgttcccgatattgaagtcttcaaagacggctccttcatgaatgagagcgagataagttccggtgatgatatcactgatgtagctgaagcagcgtatttgtccgccgtccccgtaaagaggcagctcagagccattctcggccaggctgaaaaacttgttgatgacaaaatcctcgcgctgtttcggcccgtatacattaaagtaccggacgacccgaatatgaagttcgtcggaagcctgttctctcaaatattcctctgattgcagtttggcttttccgtaagctgatttcggaagctttctgcttgtctcggtataaggaaaatccggtgaatctccgaacacttctgaactcgatgagaaaagaagtgtgctgattcccaattcaccgcatacctcagtgacgtttttcgttccttcaaaattgacccgtatgacgtcttcttcattgcttcggcagctgtccactccgaccattgccgccaaatggacaaccgcatccgctccccgcagtgattcgcggagggacgtccggtcaaggatatccgtttggcggtattcagtgtcaaaagccggcttcttttggtctgcaatgatggtgtgataacctttatcctgtaataatgccgccagttcgcttccgataaaaccggctcctccgataatcgcaatatgtttcatgatcctacctcctggctgatagtcaacacttcttttatagacttgacaatatagctgcaatcctcatctgataactggctgtaaagaggcagtgatacgatctcccggaaaacacgttcagttaccggaagctcggcaggaaaatgttttttatagtaaggatgcaaatgcacgggaataaagtgcacgctcagcccgatttgtttttctttcattttctcaataaacagatctctgtccataccgccgttttctcgaatccgcaaaataaataaatgccatgagtgcgttatgccgcttggaatgtcagaaagcggaagcgccgctttgtcagattgacctgacagttcacgtacataaaattgagcgatctgttcccgtttttcttgaatgtcgtttgcgcgtttcaattgaaccagaccgagcgcggcctgaatatccgtcatattatatttaaagcccggcagtaaaacgtcgtatctccagctgcctttttcaccgtaccggttccaggcattttttgtgatgccgtgccagccgtacagcctcgctctttctgcggcctgttcgtctttcataacgagggctccgccttcccccgttgtaatatttttggtggcataaaagctgaagcacacggcatcgccgtgagtgccgatcatgcttccgttatattttgtaccgagcgcatgagcggcgtcttcaatcagatacaatccgttttctttacaaatggattgcaagttttccagatcagccggatagccggcaaaatgaaccgcaattaccgcttttgtgcgcggcgttattttcttcctgacatcttcaggatcggcacatagacttttctcgcatatatccgcaaacacaggaacggctccggcgtgcagaatgacattgacgctggaacagaacgtgaagctcggcacgatgacttcatcgccttctcccaccccgagcgccaataaagccatatgtaatgcagcggtgcctgaattacagctgatgacgtgttcggctcctatacattctcccagctttttttcaaaatcgattaccttcgggcctttcgaaatccagcccgattgaatcgtttcggttacgcttgcgatttcttcgtttgtcatatcaggtctgtgaaaagagataaatcgattactaatgaccgttccctcctataaagtgacaactctgcaattgtcggctgatttttccttgcatacatttcttgtgtcaaagataatcggtgaggcatccttcaaaatactgtagtcgattacatcgtgatctgtatgaatgatgatgacgtcgtactgattgatttgttcttttgtgaaagggacagattgtttgcggcttccgtcattcaagcggatctcgctgataaacggatcatgataatcaatcgcgcatcccttgtccatcaattcttccattatcgtaaacactgaggattcacgcgggtcatttgtattttttttataagcggcccctattattaagatgctgcatttgtctttgcccgccagttttaaagcatagtcagagacagaaatcggcatgttggaattgatttcgtccgcgagatcaattaattttgtctgcagccctttttcattcgcgatccatttgaagtaaaaaggatcaatcgggatacaatggcctccgactccggggcccgggataaatttttgaaagccgaacggcttcgtgtccgccgcgcagatgacttcccatatatcaatatcaagttcacggcaattaagcgccatttcattgataagagctatattgacataacgataagtattctctaggagtttagctgtttcagctacttcgggtgaggtgaccgggtgaatgcttgtaacaatggtgctgtaaaacgctgaggcaagttctgtgcaagtctgtgtggttccgccgactactttaggaatatctgaaacttcatattgcctgttgcccggatcgattctttccggagaataagccgtaaaaaagtctgttcctattttcatgccgcggcttgatgccattctgtcggcaatcttttttttcgttgttccgggataggtggtgctttctaaaattaaaagctgatgctgccttccataagcgatcatgctgtcaactgcactgtcgatgtaggttaaatcggggatcttgtcttttttgttcaggggtgtcggcacacatatcacaatgatgtcgcatttttggatgagcgacatgtcggcgctgatttgaaagcattttgtttgtaaagccgagttcagtctgtcgtcctctatatcttgaatatggctgcttccggcggctaacaaggaaaccttttcactgtttttgtcgaacccgataacattgtatcctttatcgacgcattccagcgcaagagggaatcccacatatcccatgcctaacacgcctacaatcgcctgcttcgtttcaatcagatgtaacagccgtttttgaccaaggttgctggcttcttttgtgacagtattcatttttcgccccctaatagatagaaaagagtattgttttttacaatttaaaacaaatatcgatcgatatcgcaattataacaaaagttaaaatttgataaatgagttttacatccttttataaattaggtattatctatttatttttcttttatttgtaaaataaaatcctgtcaaatggtatatatctggtaacaagtgagaaaatctcccttaattgagggaatatacagaaaacaatataaaaaaacaggccgaagcctgttttttattctttcactgcctcagttacagcagcggaaacgagtgatcccgctttctctaatctttctttgctgatgtgtttcatattatcattctcggtgtgataccaaggccccggctcctgtgtatcggggctgagccaaatccagttagccgacggaatccctgcttcataaaaagagacatggtctgagtaaccgagctgaatcaggtttggcttgaccaagcgggatttttcagtggctttttcagcataccggacgctcgggttttccttgccgtcaggagtcgtgacacacatttgactcgcttcttcccagtcagtcgcaatcatatcggcattaaaattggcctggctgtgctttctttcattgttcgtgagtgtactgacgtaataagatgaacccgcagaccataattcttctgcaccgaacaggataaagcggatctctttgtctttcggtatgtgtgtcaattgtttgctgatttccagaacggcagatgtgcctgaggcgttatcatccgctccgggcgcgccttttacgctgtcataatgcgctgtgacataaataatatcagcatcagaagagttggcctgtgccgctttgcgtgttcctataatattttgtgaggtgcggtttttatagtttttaaattgaatgactgcctgcttttcctgcagcagtgcttcaccgtcttcttttttcatacccgccgccggtatcgtgattcctttatcggtatgcggacggacggcgagcggttttgttgtctgattataaataatgactgctttggctcccgcttgttcggcatgtttgatcttttgagaaacggggatctttccttcgcgtatcactgcaatctttcctttggctcctgttacgtcatcgcgtgatccgcagccgccgtcaaaaatccctccctcaattctcagctctttttcaacagcggattgatcagcggagcggagcgggaattcatgatctcccgctgtgactgaacctgaaaagtactttttcaatggaaatgactgtactttgacactggcgccctgagcccgcaggcgattcgatatgtattcagccgcttccttttctttcgcagttccggtttcccgcggtccgatggtttcactcagatcatgcatcgtgtccaatgcctcatcagcatcaaaaaccggcgcagtcacggctgaataagcatgagtttcggacagcggcccggcagacgcgccccatatgacgcttgctgccaccgcggctgacataaatgaaaatttcatcataatccctcctcttattaacacctcttccctttcgattgaagaacactgattcctttaaaaaggggaaaaatgaatattattgaccaaatgaagatgatgaaaaaggagggaaaagcccgggagcataaaaaaacgccgggagaatatctcccggcgtccattccattacttattcaagttatagaaagagttgataccgtggtattgagcagtttcagccaactgatcttcgatgcgaagaagctggttgtatttcgcaacacggtccgtacgggacggagcacctgttttgatttgtcctgcattagttgccacagcgatgtcagcgattgtgctgtcttcagtttcacctgaacggtgagagataacggcagtgtagcccgcgcgtttcgccatttcgatcgcatcgaatgtttcagtcaatgtaccgatttggtttactttgatcaggatagagttgcctacgccgtttttgataccttcagcaagctttttcgtgtttgtaacgaaaaggtcgtcaccgacaagctgaacttttttgccaagacgctctgtaagaagtttgtggccttcccagtcgttctcgtcaagtccgtcttcgatagagatgattgggtatttagaaaccatttcttcgtaccagtcaaccatttcagcagatgttttcacaacgccttcgccagacagatggtatttgccgtcttctttgttgtagaactcagaagatgcagcatccatcgcaagtttcacttcttcgccaggtttgaagccggctttttcgattgcttcaacgattgtttgaagcgcttcttcgttagaaccaaggttcggagcgaatccgccttcgtcacctacagctgtgttcattcctttagcagaaagaactgatttcaggctgtggaagatttgagcgcccatgcgaagcgcttcacggaagttaggcgcgcctacaggcatgatcatgaattcttgaatgtctacgttgttgtcagcatgctctccgccgtttacgatgttcatcatcggtacaggaagcgtttttgagttgaatcctccaaggtattggtaaagaggaatctgtaagaaatcagcagctgcgcgcgcacaagccatagatacgccaaggattgcgttcgcaccgagtttgcctttgttttcagttccgtcaagctcgattaaaagctgatcgattgcgttttgttcagttacgtcaaagccgagaagctctggagaaatgatttcgtttacgttgttaacagcagttaacacgccttttccaaggtaacggtctttgtcgccgtcacgaagctcaaccgcttcgtattcacctgtagaagctccgcttggcactaatgcgcggccgaaagctcctgtttctgtatatacttcaacttcaactgttgggttgccgcgggagtcaaggacttcgcgtgcataaacatcaacaatgtatggcatgagtttgtctctccttttgatttacgcttatttttgaattaaagatgttccggtcatttctttcggtttttcaacaccgagaaggtctaataacgttggtgcgaggtcgcctaggattccgccttcgcgcagcgtcacgccttctttcgtcacaatgacagggactgggtttgtcgtatgggcagtgtgcggttcgcctgtttctgtaatcagaatgtctgcattaccgtgatcagcggtaatgatggcatgtccgcctttagcgatgatggcgtcaaccacttcgcctaagcattcatccactgcttcaattgctttaatcgtcggttcgaccattccggagtggccgaccatgtcagggtttgcaaagttcaggatgatcgcgtcgtgcttgtcagccgcgatttcttttacaagagcatccttcacttcatacgcgctcatttcaggcttcaggtcatatgtcgcgaccttcggcgagttaatgaggatgcgctcttcgcccgggaattcttcttcgcggccgccgctcataaagaacgtaacgtgcggatacttttcagtttctgcaatgcgaagctgttttaacccgtgctgtgctaatacttcaccgaccgtattgtcaaggtttaccggtttaaaagccacatatccgtcaacagattcactgaagtgagtcaggcagacgaaatacaggtttttcggatgattttcaccgcggtcgaaatcgcggaaatctttgttggtaaacgtgtttgaaatctggatggcgcggtccggtctgaaattatagaaaatcacagaatcgccgtcatgaattttcgcaacgggttcaccgttttcttttgtgatgacggacggaatgacgaattcatcatgaatgccgttcgcataagaatcgtcgactacatccatcgcgctgcggtaagacgggccttcaccgtaagccattgcgcggtacgctttttccacacggtcccagcgtttgtcgcggtccatggagtagtagcgtccggaaatgctggcgatttcgccgacaccgatttcttcgatttgctcattcagctgctgaatgtaagttttcgctgtttgcggacctacatcgcggccgtcgaggaaaccgtgaatatacaccttcgtcagtccttcacttttcgcaagcttcagcagcgcgaataaatgattgatatgactgtgtacgcctccgtcagaaagaaggccgaacaggtgcagcgctttgtcgttgtctttcgcgtttttgatggcgtcaaggaacgtttgattgcgttcgaattcgccttcgcggatggcaacgttcacgcgtgttaagctttggtacacaatacgtcctgcgccgatattcaaatgaccgacttcagagttccccatctgtccttcaggcagtccgactgcttcgcctgatgccgtcagcgtctgatgagggtattggttccaataacggtcgaaattcggttttttcgcttgtgcgactgcgtttccgactgtttcattgcgtaatccgaacccatcaagaatgatgagtgcagctggttttttactcatattgaccttcctccaataattgaacgaatgactgcggttcaaggcttgcgccgccgaccaaagcaccgtcaatatcggactctgccatatattctttaatatttgcaggttttacgctgccgccgtattgaatgcggagcttgtcagcagtttcctggctgaagctttcagcaacgactttacggatatgcgcgcagacgtcgttagcatctttcgctgtagaagatttgcctgttccgattgcccagattggctcgtacgcaataacggaagcggcaacttgctctgcagaaagacccgcaagaccttttttcacttgatcggcaacaagatcatttgtttttccggcttcgcgctcttcaagcgtttcacctacgcaaatgatcggcacaatgccgtgtttgaaagcggcatgcgcttttttgttaactgtttcatcagtttcagcgaacatttcacggcgctcagagtggccgatgacgcagtaatccacgccaaggtctttcagagcgaccgggctgatttcacctgtgaacgcaccgttttcttcaaaatgcatgttttgggcgccgactttcaggtcagttcctttaacagcagaagtcagcttttctaagaaaagagctggtgcgcaaacaacggcttccgctttgtctgctgctggaatggaagatttcacttcttcaacgaagctgacagcctcgccgagtgttttgttcattttccagttaccggctataattggttttctcatctgttccacttccttatagcagtttttatttatcgttcagcgcagctacacctggaagctctttgccttccatgaattcaagggatgcgccgccgcctgttgagatatggctcattttgtcagcaaggccgaatttttcaacggctgccgcagagtctcctccgccgatgacagagtatgtatcgtttgcctctgccaatgcttcagccactgcttttgtgccttgagcgaacaagtcgatttcgaatacgcccatcggtccgttccatacgacaagtttgctgtttttgataacttcagcgtacgtttcgcgggttttcgttccgatgtcgatcgcttctaaatcacttgggatctcagagatcggcacgatttggacgtttgcatcgttagagaaatcatcagcaacgagaacgtcttccggcatatagaatttaacgcctttttctttcgcgcggtccatgaatgattttgcaagttcgattttatcttcttcaagaagagatttaccgacttcataaccaagcgcttttacgaatgtgtaagcaagacctccgccgatgatcaagttgtccactttatcaagcagactttcgattacaccgattttgtcttttactttcgcgccgccgatgattgccgtaaacgggcgctcaggatttgtcacggctttgccgagaacgtcaagctctttttccatcaggaatcctgcaaccgccggcagatgctcggcaattccggctgtagatgcgtgagcacggtgggcagcaccgaatgcgtcattgacatatacatccgcaagctcagcaaatgctttagcaagctcaggatcgtttttctcttcaccagggtagaaacgtacgttttccaatacaagaacgtctccgtccttcatatcagaaatttgtgcttttacagcatcgccgtaagcttcatccgcttttttcacttctttgccgagcagttcgcctaagcgtgcagcgacaggagttaaacgaagctcctcaaccacttcgcctttcgggcggcctaagtggctcgcaagaaggactttcgcgccttggtctgcaaggtgtttgattgttggaagcgcagcgcggatacgagtatcgtctgttacttccccgtctttcattggaacgttaaagtcaacgcggcagaatacgactttgccttttacgtcgatgtcttttactgtttttttattcatgccttaggagatcctccttcaaaatggtttgcatagcacgaaaaacgtgaaacgtgaaaccgcctcatgatgcttccgccgcggggcagattgcagcttccgggcacgggacagatcgttttctgagccagggcaggcggctcagaaaacgaaagtgccgcggaaacttcaaaacgcggacgttctgcagcaatccggcgctttctgaaagccggttctcatggaaaaagggaaagggagtccgtccccttcccttgtccgctttcattatagcgtttctgtccgaaagaaccaagtccggccctttccgggagctatgaattaaagaccttgttttgcgatgtaagctgcaaggtcaacaacgcggttagagtagccgctttcgttatcgtaccaagagattacttttaccatgctgccttccataaccattgtagaaagagcatcgattgtagaagagttagcattgccgttgtagtctccggatactaatggctcttcgctgtagccaaggattcctttaagatcgccttcagccgcttctttaagagctgcgtttacgtcttcagccgttacgtctttgttcagttcagcaactaggtcaacaagagaaacgtttggagtcggcacacgcatagctccgccgttcagtttgcctttcagttcaggaagaacaagggaaactgctttagcagcaccagttgatgtaggaatgatgttttcagctgctgcacgcgcacgacggtagtctttgtgcggaagatcaagaatttgctgatcgtttgtgtaagagtgaacagttgtcatcataccgcgtttgatgccgaatttgtcgttaagtacttttgcaaacggcgcaaggcagtttgttgtgcaagatgcgttagagataacatcgtggttagccgcatcgtatttgtcttcgttaacacccataacgattgtgatatcttcttcgttagcaggtgcagagatgataacttttttcgcgcctgcttctaagtgtttcgcagcgtctgcgcgttttgtgaagaaaccagtagattcaactacgatttcaacgccttgtttgccccagctgagtttcgcaggatcgcgctcagcagaaacttcgattgttttgccgttaacaacaaggttgctgccgtcaactttaacttctgcatctaattttccgtgtacggaatcatattgtaaaagatgagcaagcatgttagcgtctgttaaatcgttaaccgctactacctcaacttcaggattgtttaatgctgcgcggaatacgttacgtccaatacgaccaaaaccgttaataccgacttttactgccatgattatttcctcctttaaataagtgagagatatttatattgagggactgttatcccttaataacttctttgcggctccttcgtccgtgacgagaaccgtgtttcgctgctttttaaaataagcttcgattgcttctgcttttgatgatccgcccgctaccgcgataatgtcgggaatggcatcgaggtcatcaagctgcattccgactgaatgcaccttgtgaacgacttctccgtccgcattaaagtagtagccgaatgcctctgtcaccgcatgattgtcatctattttcttcaaatcttccaaaggcgtgtttcttcgctccgccattgttctagcttcgccgattccgtgaacgagcatactcgctgatttaatcgtgtgaagcacctcttttacggaaggttcttcaataatagatgagtaggcgccttgtgacagctgcccgggaacgaacaaaagccggtaagtgcctgaagccttttccgccatatgcgcgcatatggtgttcgcctggtttttcacatcttcgcctaaaccgcctcttgcgggcacaaacaggagctcgcggttttttgaatccggcgtcatcatatcggcgacggcttcaattgtcgtaccgccggttacagcgacgatatttttgcctgaaaatctctttttcatacatgcaacggccgctctccctaattcttttttgacccaaggagattggtcgctgtctccggaaacgataatggcgtctttcagattaagccgctcttttaatgtcttttccaaaagcgtcaaccctaaaacatccttcatcgtatcttccagaatcgaaagcagtgaatagccctcttccgtcattgtcatgccgtttgttttaatatcgatgagattctgttctttcaaaaactgaacctcgcttctgagaacgcgctcggtcaatccgaggctggctgcaagacttctgcggccgatcggttcggtaagcctgatatactgcaagatttcaaatcttttctgcatcacaagcaaaagatcaggcaataattttttttgagcttgtattaactggttcatgactcaaacgttccttcctattcatactggacagaaaatgtcccgctatgacaaaaaacgtcccatcatagccaaaaaaaattatgtctgctttctttaattattttaacaggatgacattgttaattcaactgttaaaggtcaattcctcgacattcttcgcaggattttccagtatctccttgatacagtcattatatacagaaacggaatgaaggtgacagacaaaagcccgccggagcggacttttgtcgtaaaacgctttcattttatccagagtttttctatttcttctaatgatttatttttcgtctcagggcagatcgtcacgacaaacaagaaacagagaatattaatgacggcgaatatccagaaggtgtacgcgagccctaacccgctgatcatcatcggcacgaactggccgatcgcccagttggccccccataagaatatcgtcgcaataccggcggcgcgtgcgcggaggtggttcggaaagatctccgaaatcatgatccatgtaatcggcccgactgatacgcagaaagcggcgacgaatcccaatatgatgacgactaaagccggaccgctcgccagctgaaaataaaaggatgccccgattaagatcatgaacagcgccataaaggcagatccgacccccatcagctttttccggcctaccttatcgactaaaagaaccgcgataatggtgaaaatcacttcaacgacaccgacgatgcatgtcgtgataaaccccgcattctgtccgaaacccatcattttgaaaatttccggcccgtaatacgtaattgcgttcatgccgatgacctgattgaataaagccagcagaatcccgatcacaagcgcttttctcagccccggcttaaacagctgagacaatgaacccattttttctaattgtaaagacgtttcgatttgtttgatttcttctttcgcggtctgctcgccgttaatgcgcgtcagcacggcgagggcttcatttcggcgccccgctttcgcaagccagcgcggactttccggcacgataagcagcacgataaaaaagatgacggacggaatcatgccgtaagcgagcatccaccgccagccggtgtgcactccccattcatacgagccggactgctggacggcgaggttaataaaataagtgccggatatccctaatatcgtaaacagctgatacagggaagacagactgccgcgtatggccggcggagcggcttcggtaatatacgtgacagaaagcgaggagcccatgccgattcccagaccgccgatgactctggcgatcactaaggaagacacactttgagaaagcgcagagacaaccgctgacaccgcaaacaacagcgccgctgccatcaaaatctttctccgtccgaaacggtcactcaaaaatccggaaatcccgacgccgaaaacaccgccgatcataatgcttgaaatcacgagcccttccataaaaggacttaagcggtacaaatctttcaggaaaccgatagcgccggaaatcaccgccgtgtcataaccgtacaaaagccctcccagtccggccgcgcatgagatgagaatgacaaaccacttggaatgctgccgagtgacaggtacatttgagccaattggtgccgggtgattcttcatgaattttaccctcccgcgaataatagaataaaaacgcttacaaatctgagtgcggcgcttgatgttgctttgttttcttcagaaccgccacatttgtacgtacttataaagaattttatctaaaaataagggaaattagtacgtacaaataaagaataagcagtttttcataatctgtcaattatttttacagcttgatgaaagggcttactatgttatactggaatttgtccgtatacattttggaggaattgatatgctaccgaaatatgctcaagtaaaagaagaaatttgttcatggctgaatcagggaaaaatacagccggacgaaaagctgcctacggaaaatgagctgatgcagcagttcggcgtcagccgccataccatcagaaaggcgatcggagatttggtctcgcaggggctgctgtacagcgttcagggcggaggcacctttgtcgcttcacgcacggcgaaatcagccatgcattcaaacaaaacgatcggcgtcattacaacgtacatatcagactatattttcccgagcatcatcaggggaatcgaatcttatttaagcgaacagggctattccatgctgctgacgagcaccaacaacaatacagaaagtgagcggcgcggtcttgaaaacctgctgtccaaaaatatagacgggctgattgtcgagcctacgaaaagcgcgctgcagacgcccaacatcggctactatctcaatctggagaaaaacggcattccgtttgccatgattaacgcctcttatgcggagctggccgcaccaagcttttccgtcaatgatgtcaaaggcggcatgatggcttgcgaatacgtcatgtccctcggccacacgcacattatgggaatctttaaagcggatgacacgcagggcgtcaaacggatgaacggctatctgcaggcgcatcgggagcgcgggattttcccgtctccggacatgatcgtcacttacacgactgaagaaaaagaaaccgtgcttctccaaaaaattaagcatacccttgagcaaaacagcggatcacacccgacggccattctttgctacaatgacgaaattgcgctgaagacgattaatcttctcagggaatttgggttaaaggtgcctgatgacgtatcggtcatgggctatgacgattcacatttcgcccagatttccgaggtgaagctcacctctgtcaagcatccgaaatccattatggggaaagcggcggcaaaatacgtcatcgactgcttagagcataaaaaaccgaagaaggatgacgtcgtgtatgaaccggaactcgtcatccggaattcagtcaagcggatcggcgaataaaaaaagcaatgtgcgcggcacattgctttttttgctcagctgttttttaattcggcgatgatctcaaatgatctcattctgtcggcatgctcaaagctttctgaattcaccatgatttcatccgcctgtgttgtccggatgaagctttccagcttttccttcacacgctccggtccgccgacgatcgttgaactgagctgttcattgaccatcgctttttcatacggcgaccagatttgatccatgtcttcaacaggaggcttcagctggttcggcgtgccgcggacgaggtctaaaaatctttgataatgcgatgttgccagatgctccgccttttcgtccgtatcggcggcaatgacggtgacgccgaccatcgcgtacggttgatccagtacgtctgacggacggaaggagctgcggtacagctcaagggcgggcacggtgtttttcggtgaaaagtgagccgcaaaggcgaacggaagcccgagctctcccgcaagacgcgcgctgaagccgcttgagcccaaaagccagatcggcacgtccagcccttcgcccggaatggcgcggacttgattgcgcacattgcctgtcggtttgaagtaatttctcaattcttcaagctgctctggaaaatcttccccgctgtttatgtttcttcgtaaggctctcgccgttaattggtcggtccccggcgcgcgtccgagccccaggtcaatccgccccggatacaacgtttcaagggttccgaattgctccgcgatcacaagtgaagaatgattcggcagcataatacccccagaaccgacgcggatttttttcgtgcctccggcgatgtggccgatcagcaccgccgttgccgagctggcaactccttctatattatgatgctccgcaagccaatagcggttatagccccactcctcggcgcggcgcgctaaatccatgctgttgcggaacgattcagcaaccgttcccccctgtacgaccggcgataaattcaatacggaaaacgcagtatctttcaatgtatgttcagccatcgttttctcctttgcggtttagtgtaagcagatcttaaacaaggtctctaccacacaccttaccacagcttttcccgtgagttaaacaatttgattcgatgatcttcgaacaatcagtcagcggtcgtcactagtgaactctttatgaatgaatctattacattcagatatgatgagcttttcatcctataaaaatgaaaatctatcgttgaaagaacagacccaataatgttaagatatgtatgatattgaataggaaggaagtcatagtctatatgcgtaaaaaaatcttaatggcacttacaacagctttactggcagcaatcttctttacaggaaacaccgataaggcatatgccgcagacttttactccggcactcagcagcatttaaatgtaagcggatttaccgatgcctcctactacacgaaaaaagcgaaaagtgtcgattttactctcagtacagcgtatccgtcagatcgaacttttaaaggaaacctatacttacagcgaaagtcaggaaagaaatggacgacttgcaaaaagacaagcttcactttcaaatatcacgtaactaagtcattccctttaaaaggatgcaagacaggttattatcgtgtcaaagccacgttcagcggttcaaaacttgtcaatacgacaaactcttttaaaattaaccgataagattcagggccctaagatgattagggtctttttattcattctttgtgagttcctgcgcgatttgaataaaaagttttgccgccaatgaagcttcctttacggaaggaacggcaagcagaacatcgcggtacaccgcctgattcaggtctctcgtcacgacattgtccggcagcgatattcccgacatagacatttgtgataatatcgcaatccccagcccttctttgatcatgctgatagacgtattgacattgtaaacagtgaatgcggaagtcagcacagatcctgcctccctaaacatatcaataagcggtgattcgtaccctccgtcacagatgatcatcggctggcagtcaaggtctttcagagtgattgactcacagctgcaaagcggatgatcatttctaagcacgacggccattttatcttttttcaacggcagatattccatgtcttccgtaggaaaaagagtaatacctgcgtctattacccgggagcggagccattcctttacttcgttgaccgttccttcatgaagcaccaattcaagcttcggataccgctttttaaacatgctgatcagctttggaatgaaataagcggaagcggccggaaatgtgccgatatgaattgttccctgttcaagccctctttccgcggccgccagctgctcggctttttctatgcctttgagcacctctctgatatggacgagaatttttccgcccgtgtccgtgagccttacgccgttgcggcgctcgcggatgatcagcttgatgccgagctctgactcaagcgcagagatggcatggctgacagcgggctgcgtcatattcagcgcctgccccgcttttgtaaagcttcccgtttcagcgatttgaacaaaaacccgcagttgtgtaatcgtcataacgttttacttatgctccttataaaaaagattcattttatttatcttactgattaccgtatcatatgatggaattgttctacaaggagtgaacgacgtgaaacagctttcgaaaatacagacggctcttatgctggcgtttctagtcacggtgtggggaattaactggccgctgacaaaagccgcgcttgcctattcgccgcctcttctgtttgccggaatccgcacgctgatcggcggacttctattattaatggtggcgctgccccgttttaaaaagctgcgttttaaagaaacgtggccgatctatcttatttctgccattttaaatattactttattttacggcctgcaaacggtcggcttgaattacctgcctgccggcttattttcagccatcgtgtttttccagccggtgttaatgggcgttttttcttggctgtggctcggggaatcgatgtatcctttaaaaatagccggtcttattctgggctttgccggtgtcgccgtcatcagcgcagccggtttcggaggccatatttccatcgccggcattcttttggccttaggctctgcggtcagctgggcgctcggcacggtatatgtgaaaagaacgggcggacgcgcggactctatctggatggtcgctctgcagcttctgatcggcggcttgctgcttgtcagctccggccatttttcagaaagcttttcagcgattcaatggaaagctccgttcattctcagccttctgttcatttcagtttttgttatcgcgctcggctggctcgccttttttacgcttgtcggttcaggggaagcaagcaaggttgcctcttacaccttcctgatcccgctcatatccattaccgtcagctcgatattcctgcatgagccgctgaccgtcagccttttagccggactgcttctgatcgtcacaagcatttgttttgtgaatataacaccgaagaaactgaaaacacctgctctggccgcagaaaaaaaggccgttcattaaaaaaactcttgccgcggggcaagagtttttttatttattgacgtctccctttcacgagatacgcagccgtaatgaggagatagatggccgcagtgatgcatgtgatgacgatggatgtcgtcgcaattacgccgatcaggatggccaaaagcgcaagcaccgcaaaccatgtcgtgtacgggaaccatttgacgtaataagccggctgttttgttgaatgttttcttgatttcaaatgggcgaatccgataatcagccagatgaacagcacggtatagccaagggaacccatcaaataattaaacgtctggcttcctgcgaataaagaaatcaggacgcctacatataaaaatgacgtacaagtcagaatcgcatagacgggaacctttttcttcgatagttttgaaaagattttcggcagccggccgtcagaagcctgcgtaaacaagacgcgggatgatccgtacagtcccgagttcatagacgagataatcgcaagaagaatgacggcattcataatatggtcggcacccggaattccgatcatcttaaatactatgacaaacgggctttcgggaacgctgttgacttgattccaaggaatcaggctgacgatgatgaaaaacggcagcaagtaaaaagcgacaatccgcgttaacgtgcttcggacagctttcgggatcaccttttcggggttttttgtctccgccagcgtgacgccgatgatttccgttccgccgtatgagtagatcacgacgagcatcgccgtaatgacaccccccgctccatgcgggaaaaaccctccgtgatccgttaaatgagacagccccggcgccgtgtgattgccgaatgagaaaaataatagcagaatcccgcataaaataaagatgacaatcactgtaattttaatgagcgcgagccagtactccgtctcggcaaacagtttcacagaaagcatgtttacgaccgtcaccacaatggaaatgatcaaagccaatatccatatcggacattccggcagccaatattgaatgaaaatggcggctacgaccgcctcagcggcaatattgagcacccacattttccaatagatccagtctaaaaagtatgcagcgtacgacccgagagactgctgaaccaaatcacggaacgtccttgcatgtttgtttctgacagccatttcggccagcccctgcataataaacagcagaatgattccgccgaggaggtaggccagcagcacggacggccccgcttcatcaatcgccgtgctgctgcctttaaagagcccggccccgattgcgcctccaagcgccatcatcataatgtgtctggacgacatcgtccgttttaacgtttgcttgtccttttccatctatcacacgccctctcgcaaaaagtgttcatcacataaaaaagcacgccgcctctttgggaaaagagacggcgtgcctcaggcagccgcggtaccactcttgttgatcccgaatatccggaatccagcttaaaaaccttttaacgaaggtcagccgttaggacatagggaatattccgataattccgttccgccctgccacttccgggcgagttcaaagaacaatcagtccgcgttgcaccaacccgcggctctctttttctgactggattcttttactgctcccgttcacagtgttttatgttaaatgaatctcttgagtttttattttctgaatatagtaacataatatacagtcttctattttcaaagtcaatactaattttttccgctggttttcttatcacctatttaagacattttgactgaccatgtttatattcatatgcggggtgagccggcccctaatatagcgtaatcagcactttatgtatattgttcaaacagaaattccgacgaaaggttttctacgatatatggactgagcggcaaaaagttagcagaaatatgaaaggttttactcttatgctggtatcccagcttagtaactgcatatcatttctaatcgttcaactccaatgactccacaaggttctatacccggaagtcatattccatttattaaagctattgacatgaaaccaattccacaaattaaactcgtggagaacactagttggcgtaacacgaaacagtatagaagcatttgtggcgttacagctagtgtttttgagtgtttaaaggagattttcaggatacaaataacaataacgagcaacatcaggtgtagaaagttgaataaaaaacctatatttttacaaaaattgataataaaaggttgatatggtacgggtttcatactttaagatgatgatgtgtcttcactgaatactaaataaacatttccaggaggcgtttcctatgcagtctagcacatcatttaatagcccagcttaccttgaaacaaatggagtaatgaaaatcgctgatataacttatagtgataacgaatggctgaacttcgacattggaggagaaggaatttttaagagatcaggttcttatttagttccatctcttccagtagaatttcattgtcatggaatcggtcactatgattttagcaatttagatcaattagatattgaaaagatcaatacactagctgaaatagaagggattttctgtgtaccctctatttttcttcctcataatcaattagatcaatttgcagcctttatgaaagagttccatacacaaaagagaaagggacgttaccgtaatattttaggtatttcactagaaggaccattattggccagctttgtaggcacaccggaaaaagggaattgggcacccttaaaagaagaatgggaaaagatcgcttcttgcggagaatacggtcttatttatactgtactgtccccagatgctatgactgaaaactcctatctaaagaaatatatcaccgaagaacatccgagtttagaatggattgtagatacacttgtggaggctggagtaaaaccggcgctgggtcacttccaaaaagcatacccggaggaaacctctgaacttataatgaaagttatagatacagcgcaaaaacgcagcaattacactggatcagatgccgttttaacagatcatttgtttaatgatatgccgaacaattttaaacacacctggagaacaccccaagaaagagtacatagattagaggggttaaaagatgctcggttagataaatggaacatagataatataaacacacttgtcggagaagttcccggtactttgatgagagccgcgaaagaaggtctattaaccatttgtatgaattttaatagtgaacatgtagacttagaagttgcacggcgggttgtagaacttgttggctctaagggtattatagcaatgacagatcgcattgacacagattccatgtgcggccaatcactggagaaaattgaagggaataatctgtggtatcaaggaaaagggtatgtagcagcagggtcttacacaattgatcggcttatgcataatattcgtgctataggttttaatgagaaagttgtatggaatatgacatcatttgtaccattaaaagcttgtcacttcctaaatgaacttgaaaacctttccttgaagcccttcagttttatagatgaaacgaaaaaaagaactcatttcaaagcgcctgccccagaactgattctgcgctaagcaaaaaagaccaccataaagtggtctttttaagttgactttcttttaataagttttaggttcaacttatttatattggagacatctttgttattcattaagttatataataaatttgctgctgtttgtcccaactctttaataggttgatgtatcgttgaaagttctattaccttagatatcggctgattatcaaatcctataaccgccagttcttcaggtattcgtattccctgtcttttcgcttcataaatgatccccgccgcaacataatcacttcctacaaccattgccgcaggacgaggtgacttatttagcaataattttgctatttctataccattctcaatagtgtactgttcctcaaagtaccaattatcactccatttcaatccgtattcattttgaaagtgaaaaaatgatttttttctgcttatgccaacaccgctcttaggatttcctatacacagaccaatggattgatgtcctcgatttcgcagatgatcaattgccattttaattcctgactcatgattaataaatatatgtgcaacctgtttgcttgcagaagcttcacaggaaacaatattgccaaactcagatatctcgtcgagtacgtgaggggggcttacacaggatcccaaaataagaccgtcaatcagtttgtatttcaatctgttaaaaaactccatttcttgttcaggatcgttatttgattggtgcacaagtaaactgtaattatgtttattacactcttcgcctattccggcaatcagtttactgaaaaacggatggttgattttaggaacaatgactccgaatacatttgtcttccccctgaataggttaatcgcgttgaaatttggtacataatttaattccttcatagcttttaacacagcgtcccgcttctcaggttttacataaggatgattgttgagaactctggaaactgttgtccgagaaacgttcgctttctttgctatctctgtaatgtttgtcattactgttactccttcttagacagcgttatcaggattttacactgaacaacacaagggaaaataagcatttaatgaattgttttatcatggcctgcatgaatatgtgcgccttcctgtcccacactataaatagaacgaggcttccccatcttgtgtaatagtttgtcaaataaacctactaatatccccagacatagcaacacaatgatggtccctatcccaatcggcccctgaagaatgattgcaagcacaaaagctaaagcttcccctatcgtctttgtaatattaataccccaacctgtgcgttcagtaatagccaacattaattcatcattcggtatcgaaggaaaagatgctcttaaataaatagcgattcccatagccaatatacacaaccctatcaaaaataaactccattgaagaatgacagcatctgtttttaagaacgaaagaacctttaggtttaaaaggtcaacaaaacttccaataataaaaatcggaataaaaccggctagattaggaaaccgcatttttatgaggctgtttataaagataaggattcctccgacaatgaaaacccatgacccgattgtaaggccaatgagttctgataaagccacgtttagagcatcccagggggcaattccggtattagatttaatcatacatacaacccccacggataaaataaacaatccgacaatatagattaaacaccttttcacaaaatggctcatggctgtatactccgcggtttagggtcttcttctttcgtcagaatgtaatgatcaaaagcataagatacaccacactcatcattcgataacgttttaaaagcagccaattgaataagcttcttatctgcatttcccatggctatccctattcctgctgcatgaaacataggcagatcatttaaattatcacctattgcgattgcattccgcgcatccgttccataatgttcacaaagtttatttaatgacgctcctttatctactcctgcacttgtgatttcaagattgaatgctcctgaactcgttacggcacactccttcagttgtccaaaatattctttagctttttttaattttctttggtttggcgaaacgatcatacattttatgacataccgataatcgatagggtcaattgtacccggtatttcctctaacccgtattgatggatttgagctttaatagaactccaaaatacttcttgattaaaatgaggttcttccattaccgtattgtaaagttctttttcaagctgctgaattccttgatttgatacgacaattttgtcagataagtaaagctgataatagatttcctctttatttaaccatgttatgataggttggattacatctgaatccataaaatgttcgaatattacctgatttcccacatcaatttgagcgccgtttgaagcaataatcggaaaatccaaatcatatttattgatgatgtgttttgcatcaaataaagctctccctgtagcgattgttacaagatgaccttgtttttgtccaagctttaaagctcttacatcttgttcttggatagttaagttctctgataacagcgtgccatctaagtcaattgcaattactttcatgtgaatttcctcctcagagtttaaaaatcattgaaagtataatgtatggtacgcgtttcagagcaattagattattatattaatttgaagtttttctccagaagctgattagacctgtgcttctcaagtgttctcctgcttaatgatccttctcttttgctcaatccagttaataaagaactgactgctaatggcggaacactaatttgaagaaattcatctggaatttcaagcgctggcaactcactagaaaccggactgtagcaggacagctttccatcatgagtttgacttatggccggcgacttgggcaccggcactttccagagaacgatcactttttgtgaaaatcggatgtatgaagtgtcattgaggcggtgtccccgatatacttgtctcttttctttcatttgcggtaaagaaagcaaaacctgattcccttatgccagaacttgctttatcataaaagtatgcgtttacattcgagtagggaggttatagcatgacccctgtgaattcaagcagcatcgggaagattcaggcggccagcaaaggtttgtcgccaaaattaagagcgattgcagaccatatcgtgaaggaaccgaaagacgtgattcacctttccatcattcagctggcggaaaaaacgaaaagctctgaagcgacgattttcaggctgtgcaaacggctcggtttttccggctatcaggatttaaaaatcgcgcttgctcaggagatcgttcaggagccggtgcagcacattcatgaagaaatgaaccccgacgacgatatcgaagtcatcatccggaaagttttccgcacaaacatttccggtctgaccgatacctttcatttattagatccggccgacgttgaaaaagcggtagaaatgatccaccgcgcggacagaattgaattttacggaaacggcggttccgggctgatcgccactgacgcatatcataaatttatgcgtacgggtataaattgcatcgcgcacacggattctcactttcaggcgatgtcagcgggtcttctcggtcccgaaagcgcagtcatcggcatttctcattcgggaagcaacaaggacgtgctcgacgcggtgaaaacggccaaatcgctcggcgccggcacgatcggcattacaagctaccaaaagtcgccgctcacccagatttccgacgtggtgctgtatacatcaacaagggagacggctttcagaacggaagcaatgtccgcaaggcttgcccagctgtcggtcattgatacactgtatttcgccacggcccggctgcggcaggagaaaacgctcgccaacttgcagcaaatcagaaaaatgatcgcgcacaaacgtttgtaatatttatttttcaaaagagagaatgccgatacagcgggaattgaggcaattttatgaaaaaaattttcttcttcatcgttgatttataaaaaaattattcctataattgactttgtaagggcatacattattaatctatcttattattcaatcagattaggcgggatatattatgaaggaaacccaagctgttatcggtctggatatcggcacgaccagtacgaaagccgttctgttcggaccaagaggcaaagtattagccaagcattcggttcactatgatttaatacagccaaagccggcatgggccgagcaggatcctgagcacattctggaagcggttatcggaagcatcaggggcgccgtcacaaaggccggactgagccctgacaatctgcttgcaatcggcatcagcaccgccatgcactcattgatagctgtcgatcaaaacggcggcctgctgaccaaaagcatcatttgggcggacaaccgcagcgccgagcaatcaaaacggattttaaaagagatgaacggttttgatatttataaaagaacgggtacgccgattcacccgatgtctccgctttccaaaattgtgtggatgaaagaacaggacaaggagacattcgcgaaaaccgccaaattcatcagtattaaagaatatattctgcacgagtttttcgggacttatgtcgtcgattattcgatcgcttcggcaacagggctgttccgtttagatacgctttcctgggatgaagaagcgctccggattgccggaatccgggaagatcagctgtcggacatcgtgccgaccactcatcagctgcgcggccttgcgccggaaatcgctgcacggatgggcattcatgcggatacaccgtttattatcggcgcaaatgacggcgtgctcgccaaccttggagtcggcgcgatcggcaaaggcgaagtggccgttacgatcggaacaagcggagccgtgcgttcggtgacggatgcgccgattacggatgaaaaagcgcggacattctgttacgcgctgactgacaagcattgggtcatcggaggcccgacgaataacggaggcattatgctgcgctggcttcgagacgaattcgcttctccggaagtcgaaacggcgaagcggctcggcattgatccgtatgatttaatgattgatatcgctgataaagtgcccgcaggctctgagggattgctgtttctgccgtttttatcaggggagcgcgcgccgttttggaatccgaatgcccgcggaacgtttttcggcatcagcctccgccataaacgggagcattttatcagagcggtgctggaaggcgtcatcatgagcgtcttttcaatcggtgtcgcactgagagatttggcgggccccgcaaaagacgtgcgggcttcgggaggatttgcgagatcgccgctgtggaggcagattttgtccgatacgatgggacgggaagtcctcgttccggaaagttacgaagcctcggcgctcggagcggccgttctcgctttgcacagccttggcgaaatggaacggatcgaggatgttcaggactggatcagaatttctcaccgccatgaaccgaacgtcaaaaacagcgaaacatatattgagctgttttacttatacgagcggctgtatgacaagctcaaagatgaatttgacgtcatcagtgaatttcagctcaaacaaagccgttaattcttctttgaaagggtgaaaaggtcatgttactgtttattgtcattgccgctattatcgttttactcttattgattacggtcgctaaattaaatccgtttatcagtcttttgattacatccatccttgtcggtttcgcaacgggcatgaatctgccggacattatcgcttcgatgaaaaccgggctcggcaatacgctgtcgctgcttgcgatcgtgctggccctcgggacgatgctcggaaaaatgatggctgaatcaggcggtgcggagcgtatcgcccacaccctgatcggccgcttcggcaaaaagaaagtgcattgggcgatgatggccgtcgcttttattgtcggcatcccggtctttttccaggtcggcttcgtcctgctcgtgccgcttttgtttacgattgcgattgaaaccggggtttcattagtgacgatcgggattccgctccttgcgggactttccgtcgtgcacggattggttccgccccacccggcggcgatggcggctgtcggcatttatcacgccaatgtcggaaaaacgattttgttttctttaatcgttgggattccgactgccatcatcgcggggccgctttacggaaaatggattggtaggcgcattcataaacccgttcccgaactgttgaaaaaacaatttattgaacagaatgaaaaacgcaagcttccgggattcgcaaatacattgtttacgatattggtaccggtgatcctgatgcttatggcaacgcttgccgaaattgcgcttccggaaaaaagcacgctctatgaaacttttaaatttattggcgaccctgtcacggcgcttttgatcgccacggtttactcctttttcagccttggtttttatcagggctttgacagagaaagcattttaaaattcagcaatgactgtctgggaccgattgcttccattctgcttgtgatcggagccggcggcgcttttaacaacgtcctgattgattcaggcgtcggcacgtatatcgctgacatggcgaaacactcaagcttctctcccgttcttttaagctggacgatcgcggcggtcatccgtgtcgccacaggttcagcgactgtcgccatgatgacggcggccggcattgttgcaccgattgcatctgtcatgccgggcgtcagcagtgagcttctcgtattggcaacgggagcgggctctttgattctttcacatgtcaatgactccggtttctggctcattaaagagtatttcggaatgacggtcaaagaaacattcctgacatggacggcgatggaaacgattatttctgtcagtgcaatctgttttatcatgatcattaacgcgtttatataaaaacaaaccccggccgcaaaccggggtttgtttttttatcggtcattcacgaggatataagcggctttaacgggtccgtggacgccgacaaccaaatccatttcgatatcggccgagttgctcggcccagtaatatagttaatgcaggaaggaacggtgacgccgtctctgatctgctgtttcaatatatcgctggcctgtgtcattctcggcacaatggaagatttcgggatgattgcgatataggtggtcggaagcaggctgacagaacggccggcatgctctgacgcatacaaaacgacggtggctgattccgcaagcgtgatctcgctgaatgtaatgcccacattcgcttgttccgctttttcaatatttttcgctccttgttccgcgtcccattcccaaacgggaatcccttcgtccggccactcttctgtcataagggtctgcaagccgtacgtttcaaaccggctgtccttcggaatgatgacaggccctccttcaaagcggttcacctgcgtgcgcaaagcgtcgtaaagcccggctgcatccgtttcgatcagttcggtatgaatgttgacgcagtggtctttcagcatcgtgacaagatcgtcttccgtacagcccgcatgcgtttgatattgaggctgatacttccattcaggcagggacacgcctgatttcctgcgctctctgcccagacgttcggcgatccggtttaaaaaggattcctgatgtgtaaccgtccctttcatcatcattcttcccccttttgtttttcccggtctttaaaccaatctctgaatctcgatttatgcggcgccgggaagtcccgtattgccgtccattcttttaacggccccggcccttttgatattttgtcatcttccgtaaacggcgtcatggcggcaggcgcccatttcgatcccattttataaagggacggggatgacgagccgagcccgaaggctttcatcgccagtttttcgctgatcggcgctttgccctctttttccacgatgttctgccgatgcttgagcagcagctcgtgcagcggaattttaacgggacatgcttccgtacaggccgcgcataaggaagatgcgtacgggagctccttgtattcgtcatatccgccgagaagaggcgataagacggcgccgatcggacccgaatagatggacccgtacgagtgtccgccgacatgccggtacacgggacagacgttgatgcaggcggcgcagcggatacattgcagcaccgattgaaattccgtgccgagtatgcgggaacgcccgttgtccacaaccacaaggtggaattcctcaggcccgtccgcttctccttgctgccggggtcccgtcagcgccgtaatgtaacttgtaagccgctggccgacggcgcttctcgtcagcatgctgacaagcacttcaaactcagaaaatgacggaacgatccgctccattcccattacggtgatctgcgtcttcggcagcgcggacacaaggcggccgtttccttcgttcgtcacgagactgaccgatccggtatccgcgatcgcaaagttgcagcctgtaatgccgacatccgcttcgagaaattttttccggagaacgctgcgcgcgtgcatgacgagctcttccggtttttccgtctgtttgtattcgagtctctctttaaacacgtcacggatctgctctttgtttttgtgaagagcgggagcaacgatatgtgacggcggatcgtgatcgtcaatctggagaatgtattcgccgagatccgtttctgtgacttcacagccctcttcctcaagcacttcgttcatattgatttcttctgtcaccatggatttggattttacgatttttttagcgtttttctgccggatgacatcgcggatataggaggacgcttcttccgccgtttcggcgaaaaagacatgtccgcctctgttggcgacgttttcggcgagctgttccaaatagaaatcaagattgtccagcacatgctgtctgatttcttccgcatgggaacgccaatcctcccagtttcccaattcttcggccgcctgaagccttcttgtcctgagccgttcctgcgctccggagacggctcctctcataaactcattatctattccttctgatacccgctctttaaaagcggcggtaccgattttcatcgccatgattttccccccttgttgtttctcgtgttatctgctgttcagcacttcggcgatgtgcatgactctgacgtttttatccttacggtcaagacgcccgccgatattcatcagacatccgcaatccgctccgatcagcacctcggcctccgtgtcttccacgcaggcgaccttctcatccaccatttgttcagagatttgcgccattttcacagaaaacgttcctccgaatccgcagcattggtgttttccgggaagcgcggtcagctcgagccccttgacatggcgcaaaagcttcatcggctcctccgacacgccgagcagcctcgtcatatggcacgatgtatggactgtcgcttttttatgcagcaccgccccgacatcctccaccccgagaacgttgacgataaaatccgttaactcatatgttttgtccgcaagctgctgcgcttttgccgcccacttcggatcgtcctgaaacagatgcggatattcacggaacatcgtcgtacaggaacctgacggactgacaacgtactccgcttcttcaaacgcggcaatcatccgcttcatcgcttttttcgcatccgtcacatacccgctgttgtatgcgggctgcccgcagcaaatctgcccctcgggaaaatccacctcacacccgagccgttccagcacctcaaccgtcgcctttccgacattggtctggaacatatccacaaggcacgtgacaaataatgagactttcatgatgaacccctctttcatcctcaatatgtgatccggtcatctgatgacctgtttttgggaaagctctatgaatatcctacactattctgaatatggattggaaggtttttctgaaaaatcctttcgtccgatgcgctgaaggggacaaaaaaaagagaagcccgaaagctcctcaagctgctctacatcccgttttccagcagacgtcccagtttttgcacaccctcttttatcgcggctttaccggcataactgaacgacaggcgaagatattccgcaccgtcttcctgatgcagaaaaaaatatttaccgggtacataggaaacgccgtgagacagagccctctccagcattgcggatgtatccgctcccggcactttcacccatacaaagtaaccgccttcaggcacgtgccaggatgcggattccggaagatatcgagctgatgcggcgagcaaaacgtcacgtttgctttgatatgcttcccgcaagacggcgagccgtttttcaacattcgtttgttccagatagacggcggtcaccgcttgggaaaacgggtggcctaagtctttttttaaccatgacaatgccgtgatgaatgcagcgttccctgcaatccagccgatcctcatacccggggcgatgacttttgataatgaaccggcgtacagcacccggccgttttgacccatggctttcaagggcggcggaatatcggtgaatccgagctctccgtatgcatcatcctccaagatgagaaaatcatacgtttcggcaagctgaagcaggcgggttctccgcttcgctgacattacggttcccgcaggattctgaaaagcgggtatcgtgtagagaagacggggaagcagaagcccttttcgttttctttcctcaagcatgaacgctaatgtttctgtttgcaggccctcttgatctgtcggaacgctcatgatatgcggtgtgtaatttttaaaaatctcgagcgcttccatgtagaccggagcttcaacggcagcggcggtttgttcatcgaggaaaacccgtgcagccagatctatcgcctgacaggcgcctgacgtcacgagcagctcatcgtcccgacagtgaatgccgcggatggctacccgttcttgaatctgcttttttaatacggccgtcctcgggcttcccatataatgcagcggcagatcgcgctcctcatccagaaggcgggcggcggcttctttcagctccttatcaggaacgagtgcgggatcgggatagccggaatgcagggggatgcacgctttcggaactgccggcatccattccccgggaggatcgtttgtcagagctttctttacatggtcagaaaaaaaagattcggcctgcatgtgatgttatcccctttcacaagtcagcttctatacattttcttcaaaataagcccccagcacttcttccacattcgtcaggtgcgcggtcatcgcggcttccgcttcatccgcgtctttggcggcgacggcgctgtaaatgcgttcatgctcttcatacaatcgctgcacgctcgttcgtttagaaaacagccaaatttttctcgtttctctcattgtttccaaaaggagcgcggagacatgattcatgagatgcttgagcagcccgttttgtgatgcttccgccagcgccatgtgaaaggagaaatccgctttttcgcccaattcttcgtctccgtcaatatctttcatctccaggagagcttggcggattttttgtaaatcgtcttcggtgcgtttttcagcggccatggcggcgacgccgagttcaagcagctttctgacttcgagcagctgtttgacgtcctcttttttcatcaagagggcggaagaaagcggctgggaaacatgagacggctcaaattctcttatgtatgtgccttctccctgcttcatgtcgacgagccccatcgctttcaaagccgacagcgcttctctgaccgccgagcggctgacctgaaaactctcagaaagcgcctgaacggaatcaagcttttcacccggcttaagctcgcccgcttttatcttctccagcaatgcgtcagcgacttcctcgtagatttttttcgttttaatttgtttatatttcaacgcgatcaccccgtcacttgtgaatcttgatgtttatcgtctattatacttcttttttcgcaccgccgacaggttcagacaatttgttcaagaaaagtattgtactttcaaaactttcaaaatataatgctaattaacccggtcatcagatgaccttatcataaaaagtaatcgcttacatgacataaggaggggttttttagggatgcaatggacacaggggtacgctcctttagggggaaatttgcttttatcggcagcttgcgcgctcgtgccgattatcttctttttttgggcgcttgcggtgaaacggatgaaggggtacatcgcggggcttttaacgttagccgtttcacttttaatcgctgtatttgtttacggcatgccggcggaaaaagcggtgatgtccgcttctcagggagcggtgtacgggctgcttccgatcggctggattatcgtcacatcggtctttctgtataaaatcaccgtgaaaacgggacagtttgagattatccggagttcggtgctctcaattacagatgaccggcgtttgcaggcgctgctcatcgccttttcatttggggcgtttttagaaggcgccgccggtttcggcgcacccgtcgcgatctcggccgctttgctcgtcggacttggttttcagccgctgtatgcagcgggaatttgcctgattgccaatacggcgcccgttgccttcggcgcgatcggcattccgattaccgccgtcgaaggtccgaccgggataccggcaatggaaatttcccaaatggtcggccggcagcttccgtttttatccgtctttattccgctttacttaatcattttgatgagcgggtttaaaaaggcttttgagatatggccggccattcttgtttccggcgtctcctttgcggccgtgcagtacgcaagctcgaattttttagggcctgagcttccggatgtgctgtcggcgcttgtttccatggccgcgctcgctgtgtttttgaaattttggaaaccgaaaacggcctttcgtttcgcggcagaacgggaatcagcagcggccgctgaccgggcgccgatcaagtacgggggcgccgcggtgtttaaagcgtggtctcctttccttcttctgacggccatgatatccgtttgggggattcccggcgtgaaggctgccttaaccggtcattacgaaggaacgtcaatgtggctttcctggctgaatgcagccgggcgtgcattgaccttcacgcctcccgtcccatttgtaaatcagcagattcttcaggcggacggcacgccgattgaagccgtgtacaaacttgagcttttcggttcagcggggacggcgattctgactgccgccgtcatctccaagttcgccctcggcatgtcgtggaagacatggggcgaagcgtttatagaaacggtgaaggaattaacgcttccggtcgtgaccattgtttctgttgtcggctttgcttatgtgacgaatgcttccggcatgagcacgacactcggtcttgcgcttgccatgacgggcgcgatgttcacctttttttcgccggtgctcggctggctcggcgtgtttattaccggctctgatacgtcggccaatctattgttcggcggattgcaaaaggtgacggcgctctctgtcgggatggacccggttctctccgttgccgccaattcatcaggcggtgtcaccggaaaaatgatttctccgcaatccattgcggttgcctgtgccgctgtcggtctggcgggcaaggaagccgaccttttccgttttacgattaagcacagtctgtttttgcttctgctcgtctgtctcattacatttttacagcatcatctgttttcatggatgatcccgtaacacggagaacctccccggggtttggctcggggaggtttcagctgtaccgttttctcgccgatgacggcggaatatttaattggtcacggtatttggcgacggtgcgccttgagattcggatgtcatattgttcatgcagcagatcggcaagcttttggtctgaaaaaggtttctttttatcttctttaccgaccaatgcctccagatgcgcttttacggcataattggaggcgccgccgtcccctgacgattcagctttcgccgagaaaaatgttttcatttcatacagtccgtacggcgtctgaacgtacttccctttgatggcccggctgatcgttgattcgtggagctccagcgtttccgccacctctcttaaggtcagcggctgcattccgctttttcctgtgagaaaaaaggattcctgccgttcagtcaggacgccgataattctcgtgatcgtttgttttctttgcgacaaagcccggttcagccagcgccattcctgatattttgccgacagataatttttcgtgtcacggcacccggcagctgacagcagcggctgataatgggtatgaagctggatatcaggaaacgaacggctgttgagccgcgcttgaatgatgccgtttttcactgtgatgaaaatatccggttccacgtaaaaacccggctcctcatgcgcataacggagccccggcctcggatcaagggcgctgatcatgtcagcgatgtcctgaatgtctttaagcggaatgcccgttttcagtgtaagcgctttccagttctttcttgcaaatagctcaaaataggcgtcggcaatccattccgcctgttcgttccgctcgggaagacggcggagctgaagaaggatgcattcctgcaaagaccgggcgccgattcccgcgggctcaagggattgaagctttttcagaaccgcttccgtctcctcttgtgaagcggatacatggtcggcggcagctggtatgtcctcttttaaatatccgtttgagtccaatgaatgtatcagataattgaaaatctttttctcatcatcggacagcttcatatctaaggcttgctgtttgagcgaatcctgcagcgttttgcgggtaagtctgatctgctggcttccgtcccgttctttcatcctgtttttacttgttttatggtaagatagtggcggcgtgtctgtttcctttcgttcaatcagagggttttccagtgagagctcatcaatatatccggccagttccgcggaattgtatccgagtaatgtgatagcctgtttaagctcttgcgttaattgaggctttaacatttgtgtttgctgaagtttgatatccatcatgctcactccccttttttcattgtacatgattggtttcataccgtatatacttattaaaaggagttgctttatagatgtcagaacttttttctgttccttattttattgaaaactttacacagcacattgaaatgaatccgaatgaagaccaaattcatgcgatgaacagctattaccgctccgtcgtctcaacccttgttcaggatcagctgacgaaaaactcggttgtgctcaaaagaattcagcatttggatgaggcgtacaacaaagtaaaacgcggagaaacaaaataaaccttccgctcattcaaagcggaaggttttccttcgtgccggcggtttccccgatcagacggacatccggcgcttcgtgcatccaggtgtaataatagttggcgtttttcccgtatgaattatcaatgacggtattcggtttcccgagaagcgaggacagaatgtggccgtgaagccttgacgtttccaccgattcgtacctgctgaaaaacaggaccgatttcttcgttaagaaatcggaatagcgtttccaaaaccgcgcaatcggcagcgggtttcccgcttttttattcaaaacattcagcgtttggaaaaaagcgattcccctgcggtcgcttgctgacagcacatcctgccagtcgcagcttttaacggaagaattgttttgcagcttcggattgatttccccatccgtgcggataaaatgaagcctgccgcgtgacggagccgctgacgccgccatcggatacagctgatgggccatgtcaggcataagcccgatatgattcgccgaaaagaagtgttttgcagtttcgtaggacacatgatctctcgtaaacaggtggagatccttgtgctccgcaaaaagcgccgatgtcttctcaagccgtgtctcatcctgataatagatggattgcggcaggatgacgatcctgttttccggaaaggatttgacgattttttccctgaacgtctgatagtacggatagagatccccgaaatttccgccaccctgacagacgatgatcgtctttttgtccgcccggcgcccgaatggaaaattgtcgggattccagcgctgtttcacgcggatgccgtgcgctttaaaaaacgcctccgtccctttcataatcaataaatcccctacatttccgtagaggggatagtcggcataaatgatgtcagattgcggcggtataacgctgagcagacccgtcagcgtctcttttaatcggctcataacatggcggctgtccatgttttctcccctttcgtttcaaacagttgtgcaagtgcgtcaatgacacgctgctgctcctcagaagacaagtcagacccggacggcagacagatgccccggctgaaaaggttctcagagacacgctcatgttcgctgtgaggataaaagacggaagatgagaaaagcggctgcgtatgcagcggtttccacagcggccgggcctcaatgttctgttccgcaagacaggcgacggcttcttccggcgtcacgccgttatcaagcgtcagagccgtcagccagcggtttgaaaccgttccttcaagctccggcatcatgcggatgcccggatacgtttccagcgcttcccgatacctgtgaaagatttctctcctcgcccgaacgcgatcttcgagcacttccagctgcgatatccccacgcccgcgagaatgttgctgagcctgtagttatacccgagctcgctgtgctggtaatgaacggcggcatctctcgcctgggacgcaagaaacctcgctttttcaatcgcggcttcatcgtcagacacgagcatgccgcctcccgatgttgtaatgattttgttgccgttaaaggaataaatgccgaaacggccgaacgtgccgctctgcctgcctttatatgttgatcctaaggactcggcagcgtcttcaatcagacagacgccgtatgcgtcacaaaggctcattaattcatccattttcgcgctttggccgtaaagattgacggcgatcaccgctttcgggagtctgccgcgccgctttgcatcccgcagcgcccgctccagcgcatcgggcgacatattccacgtctcccattccgaatcaataaaaacgggctcagcctgctcatacacaatcggattcgccgtggcgacaaacgtaaaggaaggacaaaatacaacgtctccttttttcacacccgcaagccgcagggcaagatggatggccgccgttcccgagcttacggccgccgcgcttttcactcccgcatattccgcgagccgcgcttcaaacgaattgacgagcggaccgagcggggcaatccaattggaacggaaggcttctgcgatgtattcctgttcttttccgctcatatgaggcggagacaaataaatccgtttgtttgtttgcatgaaatcatcctttttcattatggataggggagatgacgcgggccggaacgccgaccgccgtcacatggccgggaatccggctgatgaccgcagcccccgcgccgataacggaccaagggccgatgtcaagctgcggtatgacggacgcgccgattccgaggtgcgttccttccccgactttcactccgccggcaagcgccgcgcgcggtgaaagatggacgtaatctccgattgcattgtcatgatcggcaaccgcccccgtattgatgatgcaatgggcgccgatgtcagcgcccgcctgaatgacggcgcccgccatcacaaccgttccgtgtccgacggaagccgtttcactgacgattgccccggggtgaatgagtgcggcataatcgtcatcttcaagcccaagcgtttcagcgaactgctttctgacgccgttgcggccgatgcatatcgtgaatacggcctcggggacgagtttccgaagcatgggcacgtctttcgtccggcccgtatataaaccgttccgaacggcaaaaccgctgaatccgtcatccaatacgcccgcaagctccatatcggaacgggcctgcacgatttccttcacgacttttccgtgtccgccgtttccgatcagcacgacctttttcacgatgacatatctccgctgcctgtgaagcgctttgccgtcacatggccggcttgatgtatgccttctgacacgagaacttttttcactgttaaaagcagaatctttaagtcgagaagaaatgtgcggttgtcgacgtaccacacgtcgagcttgaatttttcctcccaagaaatcgcgtttctcccgttaatctgcgcccagcccgtaatccccggcttcacctcgtggcgccgcgcctgctccgccgtgtaaagcggcagataatccatcagcaaagggcgggggccgacaagactgatatctcctttgagcacattaaaaagctggggaagctcatcgatgctcagttttctgatcagccttcccgttttggtcagacggagatgatccggaagcagcacaccgttttcatcacgcgcatccgtcatcgttctgagtttatacaatgtaaacggacgaccgttatgccccggtctcgtctgtttgaacaataccggagacccgatggcgcatctgacggctgccatggcgaagagaaggatgacgctcgcgccgcacaataacaacatcgcggccgctatatcaaatacacgtttcgccttcaaatctgaacagctcctttcacttttcggcatttctgtaaagcaagccgcctttcttctttcgtacaaatgaagaaaaaagcgaatgcggcatagctcatgcatacggcaagccccgcggcgatcaggccggcccagctgtcaagcggtgaaaacagccggataccccggcagacagcccaggcaaatacggccgccgccaacgggccgaacatgcctttgtaaaacgcggttttctgaaaaccggtaatatgcgaaacatacagcggcgtgaagacggcatttttcaaaatgagagagactgcaccggcgatggtgatgccgtacagcccgagatgagccggaccgctgagaaccacggccaatacgacattcagtccgcctaagcataaagtaacgacggcgggcgttttttgtttattaaaagccgtccatacataaaaaagcggcatgacagagagactgaccgccaaatacgcggcgtgaatatataaaagcggcgccgtctgcacaaacgacgggcccagccaaatcgccagaaacggttcggcaagccctcctaataatgcggcgggaagcgcgagcagaagcccgttcatccgcacagccttattggcgtaagacaggagaccttccatatccccttttgagtaataggaagtcaaaaccggcgcaaacagggaagcaagcgtcccggcaagacttctgagcaggagcgggaattgaataatcgccgcatagacacccgcctcagacggccccagcacgaggttggccgtcatgaggtcaatctgcagaaacagcagcacgccgatctggttgacagagctccaggcaccggccgaaaacagcactttgctcgtctgtaatgacaaggttttacggctgaaagaaaaccacggaatcaatttcttaaagaagaaaaaagtcagcacggccgcacagacggcccccgctaatgccgaaagctggatctgccagattttcggcggcaggcacgtaaacagagcgagcacacacagcaccctgaccagcatttgcacggcctgaatggagcttgtgatataaagcttgttggcaaaaaacggccccgtcgcgaaacccgccataaaaaacgtcagcataaacagcacgctgccgatcacgatagagagcctcacatccgttaagaggccggccggcacattcataatcttgtcaataaaaaaagccgtcccggcgagcggcacagcgagtaatagagatatcacgactgacgcggctaaataattgcttacatacgcattggcctcgtccctgttccccctgtgggcggcgacggagaaaaacctcacaacgacagagctcagcgcaacggtaataatagagaaatagttaatgatattctgtgtcagatggacaaacccaaaagcctccacacctaatgttttcacaataaagggcgtcatccacactgataaaaacaccgatagtaaaaacgccgtcacattggcgccgaaattaatggcaaatttcatgctccttccgcactgcctttctctttcgatttccgttcgaaaaacgcatgcagaagaagaggaaggcgcattttgcacaggccgagcaccacgcgctcccccgccagcagctgtttatggcggcacggcgtcctgcgcaccgccgtttttaccatgtcatacgttaagattctgccgatgtgcgccgtaatctgatgtgacggctgcggggcggcgcatgcgttggcgatcagcatcggaatctgatgcttgcacaaatatgtatcgatatcgctccggcaggcgtccgtcagcccgttttcctcataaaaagccattttcgctttatattgcttttgcagttcgtgatctaagtggggcttaaacggtgtttctgtaagactttgcggattttcccggtagatatacagcccttcgtctatcactttgatacgcgcggcttggcggaacgctgccaaattaaacggagagtcttcggcaaaccggatatcttcatggaacaacagcccttgcaatgcttctctccggtatatatagcgccacacataccaaataaaccgatgttcgtgcgcacgggtcagcaatgcagtcatttcatccgctgtgaagacgcggcccggcggaatggacggcggcatatacgttcgtttcttagacggcgtttccttataatagccgcatccggcgatatccagccggttcttctccgcttcttcataaagccgctcgaacatcgtttccgtcacatagtcatcgccgtccgcaaaaccgatataacggccgcgggcggcttttattccggcattgcgggccgagctgaggccgccgttttctttatgaatcacccggattctcgcatcttctgcggcgaattgttcagcaatccggcctgaccgatccggtgaaccgtcattgacgaaaatgatttcgatgtctctcagcgtctgttttgttaaagaaaccgcgcattctttcataaaaggctctgtcttatacatcggcacgatcacgctcacaagcggcgcggtcattgagcatcaccgctgattttcgagcgcagcccggcaaaataaacactgcgcaaagaaccgccttcctcatgcttgccgctgagcagccggtttacggcagacgttacggcttcagggtctggacgttcaagcaatgtcatgttcggtatgtttttcaaccattgatagccttccatcaccttatgatcaaacgaacgaatgacgacacaaggcgttttcgtcagcgcacaaaaaatcatcccgtgaagcctgtcagtgacgacggcttccgcgcctttcagcgtattccaaagcgcctccagctccttttcacgcgtatggcggctgaccctccggccgaccgtcgtcgtaaaggaatacagctctccgtactcttttgccaaagcttcttttaccatcgttctgtcctcagccgtcagcgcactctccttatcctcccgtaaacagaggtagatcccttcccgcgggatgcgccgctcgcttttatccaaatataagaccatgtcaggctgtttgagcactgtttttccgggaaaatgacgcttcatccattgatacgtcgtctcatctctcgccattaacaaaaggtcgggatgcgcattgtacacttttcgggcgcgcttcagttccttccgtcccttttttgattcagaaaagtgagccgtcgccggaagctgaacgatccgatattgccggaatgtttttatgataaagcggcgcgtccattcctcataccggtacaaatcccccatgttcccgccgccgatgatgaataccatatcatcggggtggcgctttttgatcagcgcttttgcggatctgtatatatccttcatatccacctcgacaatgtcaaaatcgggatactcccgttcaagaaacgttttgcttgcgtaggcgatggcgtgatcgccgagattatcgtgggacgggagcagcgtcagaatgatcttttttcttgccgctgtaagccccgccccatccgctgccgttccgaaatgaaattgggacgggtatttgaccttaagcaacagccattccgcgagattgatttttaaagattgtatcgacatgtcttcaccctctgattttcattttgtactcgattgcccgctgatacgcggctgatgccagcgacacgaacggaatcagcttcagcttcgccaaaagcagaaggcatgagcgtttggcgtcaaacggcgccgttccggttttggaaaggctcaggcgaaacacgggatcagcgcatatccggctgatattcttccacttctcagaaaaccggccgccgttattccgcttccattcattcagcaggcagactgttccgtgctgaacgatgaaaaaatccagctcctgccggtattcctgtaagcagccgttttcacgcaaaaaagcctcgttcagccgatagagaacgagacctgagtcaaacagctttttctgatagctttgcacaatggaagtcaagtgaatccgataatgatagagcggctgatccacgtacgagaccgcacctgcgaaaacatgcgcccggaggctgaagtactgatcctccacgtgctccagctcatcacgaagcggaaagcgcagctgatgatgctcgatcatcgttcttttgtacagcttgttccatgaaaaaccgctgacccttccttcaaataaatctttcaggtacagttgtttcgggcgccccgcgtacgctgaagcgatcgttgaaacggcggttttccccgtatccgcaaattcggccgcatattcgcaaatcacgagatcagcctgatcagccttcgctttttcatacatgcgcaggcaataatcaggttcaacccagtcgtccgcatcaataaaagcgataaattcgccgcgcgccgcctcaatgcccttgttgcggaccgcgccgagcccccggttttgctgatgaatgacccggattctctcatcccgcttctgataggtttcaagaatcgccgggctttgatccgttgacccgtcattaacggccacgatttcgatattggcgagcgactgattgagcaatgaatctaagcatctttctaaataagtttccgtattatacacagcaattaataaactgaccgcgggtgtttccatataaacctccagtgtccattaccgggaaaaaatcgttctgtacggaagcacagacgaatcgaccggcataagcaagtaactgtaaagaaaataacagacaataatggcgatataaatcagcgcatttgatttttcatcaaaaattctcacaaaataagggatcaagatcatttggtacaggccgaaatatatattaaaccgggcgaaaataacatcctttgtcgccaaaagaccgaagagcaggccgagcagacagaaattcacgatgacatcaatgtcaggccagagcttccgcagccgctcccgatagcagaaagccaaaaacagcggcagaagcagcaccgcgatttttacgacgttcatcccgttcgtattggtcatcagccatttctcataatggccgtatgagctgttttccagcacgacgacaaacagcgaaatgaacttctgatacagaaacgtcataagaagaaacaatgccgacagtccgaaaatcgcgggcgaccaggctttttttctgacgagaaaataaaccggaatcataatcagcgctgaggaatgaaaaagcgaacacagcagcacgattgacatataacgcttccagcttccgctgatcacgtagcggactgcccaaaacaaaacggccgccaccatatactgcctgatcccgttaaaggaagcgtaatagtgatacgtgcccaaaaacaaaaacacactcagctcaaacggacggccgaactcaacgagcccctttaaaataaagctgcacgtcacgaccgccacggtgaaatacatgatttgcggatctttcgtgataaaattcatgagccagatgagagccgtaaaccccggatcaacggctgcttttttcgctccgaacccgaagatctcccaaatgcttccgtaatttcccgccagcttgtacatcagcgcgtacgtctgaaaatccgtcccgactctgtagcgcaaaccggagaccaatacgagcgaaagcagcggaacgatcatgacgagctgattcggccggtatccggtcgaaagcgattgatcacgcccgccgcacattttcgcgaaccatgaccaaatataaacaattcccatattgactacatatacaatcattcgttactgttcctttttccaattcatattgtaaagcttcataacagcccccgcattttctcccgcgtcatatccctgccgtctgagggtttctttaatgcgctccccgtcaggctttgccgcctctgctgcccgtaacaccgcggatgcccattgtccgggcggttctttgaggctgagccttttgaccagcccgagcccggcatcggcttcttccgttatgccgtctgatattacgcacggcaccccggaggcctgcgcttcaacgagcgtgacgggcagcccttcataaagagacggcatgacaaatacatccagcgttttcagcagggcatgaacgcggtcttctatgccgataaaacgcacatcatcatcaagccccagcttcgccgccagattttccatatcggtgcgaagcggaccgtctccggcgagaatcagctgtaagccgatgccccgctctttcatatcagcggccagccggagcagaaattcgtggtttttttcttctgtaaagcggccgatatggccgatcaccaaacggccgcctgcaatgccccgcttccttttttcagcttctgtgtccgcgcacccgccggcaaataagtcgagatcaatgccgttcggcaaaagatgcacgtctttttctttcccgaataagaaacggcccgcgtcttctccgcaggcgcacagtgccgtggcgtttgccgtgatcagccgtctgaaaacaaacagctgcatcccggcaagccgcgacgcccgcccccgccacgacgtactgtgcgaatggcagatccgcaccgggacgccggctaaacgagcggcaagcgcgatgaatcccgactgaaaatcggtatgggcgtgcacggcggcaaacgggcctttttcctgaatcacccgcttgacctgtttcacaaatgtaatcgggtttgtgctgccgatgctcggcacataaaaaagccgtccgccgagagcgagaatttcctcatcataagcgcacggatcgttcctatgggttaaaaaatcaaactgcaccttcgttctgtccatcttccggtacaaattcatcatcatcgtttctgcgccgcccctgttcatcccgctgaagatgtgcagcacccgcatcggtttgtcagtcatgttcggcaagcccttctttttggcggatgtccctgtttttatgataacggttcatgaccgcgggcggcgtaatggcgcggatgagcggttttgcgatatacgcgtaatgggaaagcggcagcttcagccgtctgcatgcctgaaaaacgaggaccgcgttatcaatggaatacgtaaacgatcttcttttaaacgcatcactgtcctctctgactttatacagcgtttcttggagattgtacccccggaaacccgcttcaaaaaagcgcagccacaaatcgatatcctccatccgccgcgtccgcctgactgaccggtagccgccaagcgctttgtacgcttcggcccgcatcataatggtgccgtggcagaatggtgtgcctttcgccataattcccggtttcggcacgggcggcaaaagccgggcgccccttacgccgaattcgtcaaatacgagcatccccgtgcctacgacttgatagtgggcgtgcttgtttaagaaagcggcctgtttttccagtctcctcgggttggagatgtcatcaccgtcctgcctggcgatataatcccccgttgcgtatgtcagacagcggttcagcgaagcggcaagccgttgatttgtctgattttgaatcagcgtaatccggtcgccgtaatgatccgcgtaacggcgcgcaatctgatacgttccgtcagttgacgcgtcatcacacataatcagttcccaattcttataagattggctcaggatggattcaatactctccgctaaagtctcttcgcaattataaattcccatgatgacggaaattttcggttgtgctcctgcattcatacgcttttctcctttttatccatataaccggcgtaaatgtgcgccatttcctttaccgtacgtgtttccgaaaaacattccgccgtcctgcgcccttcttgtcccattgcttttcgcagacacggggagcggtacagcttttcaatccgatcggcaaatgccgcgctgtccccggccggcacgagaaaaccgttcacaccgtcttcgatgatctcacggtgccccctgttgtccgcggcaacggccggcttttcggcagccattccttcaagcagattcatgccgagcccttcgcggatgcttgaggcgacagacagatcagcaagctgaatcagttcatgaatatcgcggcaaaaaccgtaaaaccgcacaatgtcagatacaccgagtgattcagccttttttctgtacggctcttccatcgcgccttctccggcaaatacgagtttcagctccgggatgcggttcttcagcagtgccgcagtctcaatgagaagtccctggtttttattgccgtttaattcagcgggatatacgagaataaattccccggcgccgaagccgtgtttttctctcagacgttcactctcttcccggctcacagggcgaaacctgtctgtattcacgccgatgccgtgtattttcttcgcgccgtaatctgtttttttcatttgcttggcccgttcgtaatcctcttcattaatcgtaatcagacaatccgtataagaagaaagaaatttttcgatcgggtaataaagaagccagtttttcagaggcgctccgtcgcagaagtgaaagccgtgcgcggtgtacagcacctttgtccctttttggcgcgcttgtctcgcagcaaggcgtgcgagcacgccgccgaccggcgtatggcagtgaatcatgtcgtagccgttgtcctgaatgagccgtttcagccgcctgtaaacagaaagattttcgggatgaaacggcgagcgccggatcggaatggaaaacttttcatcaacgaacggaagattcatattgccgcctgccgcgacgtgcacctcccagcccatatcctgaaaccattgaaaatacggaagatgaaaggctttaaaatgataatcgacagtggcgcagaataatacttttttcgtcatctttctgtcctcccatcacacgcctgcggccgcttcttcatgtactgattcgatcgcctcaaacagcctttttctcagctcttcttcaggcagacggctgaattcctccataaaacggatgagcacggcccaattcccgtccaccgctttcccgatatggattttcggaaaaatctgctccgtatgtacttcattatgattcagcaattcttcatacatcttttctcccgggcggatgccggagaattcgatgggaatctgttctgtcgtatagcctgataaatgaatcaggttttttgccagatcgacaattttgacgggttctcccatatccagaacgaaaatctgccgcccttttgcaagcgccccggcctgaatgacgagtcttgacgcttcgggaatcgtcataaaatatcttgtcatcgccgggtgcgtgacggtgacgggtccgcctttttcaatctgctttttgaaaatcggaatgacgctgccgcggcttccgagcacatttccgaaacggacggcggcgaatttggtgctgctgacctttccgaggttcatgatgaccatttccgcaaaccgtttcgtcgcgcccatgacattggccggattgaccgctttgtcagaagaaatcagcacgaatgtttccgttccgcacatgtcggcggcttcggcgacatttttcgtgccgataatgttgtttttaacggcttcttccggattatgttccattaacggcacatgtttatgggcagccgcatgatagacgacgtgcggctcgtattttttcatcaaagtaaagattttatctctgtcctgaatatcggcgatctccgcgtgaaagagcacctctttgccgaagcgtgcggacagctcggtatgtacggaatgaatgctgttctccccgtggccgagaaggacgatttcccgcggaagaaacgcgctgatctggcggcagatctcagaaccgattgagccgccggcgcctgtgaccagaatcgtttttcccttgatgctgtcagaaattttgctcgtatcaagggtgaccggctttctgccgagcagatcttcggcttttacatctctgatgtgtccggcagcctgcgttccgagcaggatctcatcaaattgcggcatgattttaatatgggcgcccgtctgcacacattctttgtataacgtctgaagctcatgggtgcaaagagacggaatggcaatgataatatggtggattctcagcctctgcaccgccggcataatgctttcttttccgccgatgacgggcaggcccatgatttcgagcttatgcttcgtctgatcatcatcaataaaagccacaggcatgattccgagatcgtttttctgggtaagctgacggacgagcagcgtcccccccgcacctgcgccgatgatcagcgccctggaagagtcattttgcttcctgccgatcgtttctttcagcacccgtgaaatcatccggcttcctccgatgaacaataactgaaccatccagctgacggccaacagccggaacaaaatcgtgtggaacaccccgtattggacggcggctgtcacagctgctgacagcgtgatccccttcattaaggcaagcagctcgcctattcccgtgtacgtccatacctgcttatactggtgaaacataaaagcgcatacatgatggctgatcagcatgctcacggcagtcagcagcaacgctccggagtcataaaagtgataagaatcctcaaaaaattgatatcctataacaacggaaagtaaaacgagatacgtatccaatgcaaaaatcattgaaagtcttctccggtaagtcaatctttcccctcctcatttatcggtttagctgatacggttttcgtaaaaacagacataacagctaagccgataacaatgcatcatcttaagataaaattgggcatttaacccgtcctcacaccccgccaccgacgaccagcatctaaggcggcgaaaaacgccgcccacagcagagccgagtgcctccgttgataaaggtaaggagacatcacctgcaccgctcaataagagtagtgctccgtttttttgattttctttttattcagcagcgcccccaaaagctttgcctttgactgctggagagcgtctctcgccttttggacggtatccattttcgtttttccgctcaagacgacgagaacgcttccatctgtctggttcgctaaaatctgtccgtccgccacagccaaaagcggaggtgaatcgaaaataaccagactgtaccggctgtacatctcctgaatcagctctcccatcgcctttgaagataaaagctcagccggattcggcggcgtcggcccgctcgttaagacgtaaaggttatcaatcagcgttttttgcaccgtttcgccgagggaagcgtttccgactaacacattcgtaaggccttgtacattttcaagctgataggtctcgtgtatcgtcggttttcgtaaatccgcatcgacgagcagcacctttttttcctgctgcgcaaataccgcggcaaggttggcggcgctgaatgattttccttctcccggaacggaagaagtgacgagaatagagcgcaaatgggtctgaacagaggagaactcaatatttgtccgaatggtgcggtattgttcagccaccaatgatttgtgatgtaaaacggatatttgagccagtccccttcttgatttcttttttctgaatcccaaacgcctcactccccgaaatgtttttcatcagaccgtgtctgctgatttttgatgtcatacacaacccctaaaacaggcaagtctgttttttcgctgagctgccgctcgcttttaacggtttcatcaagaaaatggagaaaaaacgcaagcgtcacacccgccatgagagccgcaccgaacgccatcatgatattcctgatgcgcgaaggcttgaccatcgggctttccgatgcttttgcctcagacaaaacaatgacgccttttatattcatcctgtcacggacttcttttttaaatgtcttcatcagcgtgttcgctatagcggcggcctgtttcggattctcgtcctgcaccgctacggtaatgatctctgaatcggtttcgctgcttgtcgtgatctttgcttttaaagcggatgccgtctcagaaagatgcagcgtctgcttcactttctcaagcacaaccgggcttttcattatcgtttgaaacgtattgttgtaatgaagattcagctgaacgtcgctgagattagaatttttttcaccgcttgtttcatgaatgagcacttgggtcgatgactgataaacgggcgaaatcacccggaattggatgtatcccgtcaccagcgttacaactgctgtcatgataaaaatcagtaaaaatctgtgtttaataatgtcaaataattctttaaaactcatattctcattcatgtaattacagcctcatccttattgcatcaggcttaaacgcccccttctgttaatgattggattataaaagaaaaggtcgaaatttgaaaatttcaaattaagccatttagttctttttaaagaacattatcatgattttcctcttatttactgcacttaccttataattttaaattttataaagaacgaaaaatttcttataatgaacaaaaaaatgccagtatacaggggagaattcagcacaatgattggaagaataattcgtttataccgcagaagaaaaggctactctattaatcagctagcagttgaagcaggtgtctctaaatcttatttaagcaagatagaacggggggttcactcaaatccgtccatccaatttctgaaaaaagtatccgccaccctgcaggtcgatctgacggagctttttgatgccgaaacgatgctgcatcacatgggaggcacggaagatgagtggcgcatccaccttgtgcaggccgtgcagtcgggcatgccgaaagaagaactgttcacctttacgaacaaactgactgaaaaacgcccggagcccgcaccctaccgcaacagaaaactgactgaatccaacattgaggaatggaaagcgctgatgcaggaagccaaagaactcggcttgtccgttcaggaagtcagatcatttttagaacggaagcgttactgatgatatgctgatgaaaaggcttttattcgcttcatgtcttcatctctgtttataatgaaaagaaaaaaggggatgaaatcatgacaaaacttaccgttcaaacccgctccggcgcactgaaaggaactgccggccgcggtgcccgcatatggaagggcataccgtacgcgaagccgcccgtcggagagctcagatttaaagcgccggagccgcccgcaccttgggacggcgtaaaacatgccgattcgttcggaccggtttgtccgcagccggatgatatgctgtctatatcgttttccggagatataccggctcaatctgaagattgcctttacctcaatgttttcgcccccgattcagagggcgaaaaaaagcctgtcatggtatggatacacggcggggcattttatttaggtgccggaagcgaaccgctttacgacggatctgcccttgccgctgacggagatgtcattgtagtcacactcaattacaggctcggaccgttaggctttttacatttgtcttctattcatgacgcgtattccgccaatatcgggatgctcgatcagatcgccgcgctgcgctgggtgaaggacaatatctccgaattcggaggagacccggataacgtcacgatatttggtgaatcggcaggcggcatgagcatcgctgcgcttatggcaatgtctgacgcaaaaggcctgtttcataaagccattttagaaagcggcgcctctcatacgatcccggcggacatggcaaaagacatcgcggcggcatttattcatgaagccggcactgatcaattgcaggagctttccgttaatgacctgcttaagactgcggataaagtgcggcgctcactagatcaaaacatttttcagcttttgtttcagcccgccatcgatccggccacattgcctgcggaaccggtgaaagccatagcagacggggccgcagaaggcatacctatgatcatcggaaccaatcgtgatgaagcatatttgtttttcacccctgatacagacattcattccgagaaaaagcagcaagattatttgcattatcacctcggagagaactgcaccgagcaagcagcagatttatatccgcattcattaaagggacaaatcgatatgatgacggatctgattttctggcggccggctgtcgctttcgcacaaggacagtcgcagcacgcaccggtctggatgtaccgctttgattggcatggcgaaacaccgccgtttcataaagccgttcacgctctggaattgccgtttgtgttcggaaactttgattctttgagaaagacgctgcaagaaccgctcggtgatgacgcagaacagctttccaaacaaatccaatccgcatggctcgcttttgcaaaaaccggaaacccgaacacctctcacttcaattggcctgaatatgataccgattcacgcgaaactttgcttttcaacacggataccgctgtcgaaagtgatcccgattcagcaaaacgccgcatcttgtttcaagcataaaaaacgccaggggagccggctcccttggcgtttcgttttcatcttacttcagacatcgcagaaaatccatttccgcattaccctgatatgttatattctaacccaatacgttaaccaaacattcataaaggagtttttatatggagaaatcaagtattatcggcacagctgccgttataatcggggcgcttatgaccttagtttcatttatcttcctgcgcgacactgatttctatgccgtgaggtggataggggttgttatcatggttgcagggttttcatgcgggccggcccacaccatttcaaaacataaaaacaaacatgaaaaagaaacccggtaacctttactgggtttctttcatacacttcattttatctcacttcataatgcaactccgcaaattgcttatagcgcctgacatcagtcagcttcagccctgtctcccggtctccgggtttgaacaaagaaattccgcggccgagcagaacgggggcgatctgaatgataaactcatcgacaagtttttcctccaaaaccgggtgcagcagctcactcccgccgacaatccaaatccgcttgccttcttggcgtttcaatgcttttataaaatcggcaggctcttcatgaataaaccgcacatgttcagtgcccccggtcaatgtccgcgaaaacacatagcattctttacctttgtacggaaattcctcaggcaataaaaccaatatgtcctcgtatgtttttctgcccatgatgatcgtatcgacagattcatagaaagcttcataatcggtgccgtcttcaccttcagttccgattaaccaatctaaagagtgattttcccgcgcaagatagccatctgcgctgacagctccgtaaaaaacgagctttctttgaccgctcataaaaatccctcccccttttttattataccttgaacatgcggatgaaatgaaaaatgatagcatcgggtaaaaacccccgttaccgggttttcgtttcttcctgctttggagatgctgttaatatgccgtctatccatcttccggtaatcggcataaagaaatggagaatgacccctcctaaacaaacggttaataacgttccgatgcctaccggaccttttagcatcacggccagtatgaaaaatatgaagtaaatgaccgttcttgaaaaaaagatgcttctcccggttaattcgcggacaattaacgttaaccgatcaaccgggatcggtgcgaaatttgtgtgcagataggttgcggttcctatccctatcacaactaaaccgattgcaaaacagcccgcttttccgtaccatggttcaggcgttatgattcggtgcagaaaaaaaagccacatatcaatcccgattcccgttataaacgccgtaatcatccctgtaaattccggtctttgtctttttaacattgaattacagcaaattaacaggaaagcgatgatgatttcccagcttcccacggtaagccctgcatggacggataatcccacaataagcgcatcaaaaggagacgttccaagatctgattgaatcgtgacagaaataccaaaggtcaagatcatgattcctaaaacataaaaaacatatttcactttatcgtcctcattttcttattttatgttgcaaatacaacaaaaatacggtatgtttactatacggtattttcattgcaaatacaacaaaaaatcagctgatatgataaatgaagaaaggagctgtattgaccatgagtattaaattaaaaaagtgcagccttaacgatataacagagctccgggagataagcattgaaacattcaatgatacatttaaggatcaaaattcaccagaaaatatgaaagcttatttggaaaatgcattccgctctgaacagctgaaaaaggaattatccaatctgtcttctcaattctattttgtttattatcacgatgaccttgcggggtatgtaaaagtcaacatgaacgaagcacaatcagaaaaaatgggtgaagattctcttgagattgagcgaatttatataagaaaaaaccaccagaaacacggactcggcaaatatctgctgaatgaagctgtgaaaatcgcaacagcacacaataaaaagaaaatctggctgggcgtatgggaaaaaaacgaaaatgcaatcgccttttatcaaaaaatggggtttgtccaaaccggagaacactctttttatatgggggatgataagcaagtcgactttatcatgaccaaaaccctgtcgtaaaaggatacaaaaaacccggccaagctgccgggttttttctcttattttaattttcccgcacggatatcatcggtcattccttcgtacggcgcttctgaaatcagtgcttcgttattgattcccgcattgttgagataggtaatatccgcaaactcgggaacaacatatttcgggtacgtttcatatttctcacgtgactctttcatcacgtcaatgtaatcattttggtagcacaccgtgatttccggatgctcatgcacccatttcgggaagaaaataattccgtgcatccgtttttcattcggcataaagtttaaggaaacgtctgtgcctgtcggttcagtccatgacactttgtatacgccttctgtcagcttgacgatattcacttcctggtcgcgcacccagcggccgcctaccattccgctatgaatccgatagtcgatcgtatgatcatttttaatatagatttcatactcccagccgttttcatacgtgtaaatcatatggcttccgataaagttttccatgttgactcactctccatcttattattgaacttcataaatatctaaccgaatgtcatccggcaatcggaccgcagccccgataaacagccggtcctgcagatgctgatatgcctcgctgcttgtttcaaacacaggcacagtacggaaatacacgtgctcgggatcaatgatgcggttcactgactcataaatgactttttttaaagaaggttcattcaagacgtatcacctcccgaggtattatgtttatttaaacatgtaactatttacacgtttaattgtaacgctgttaaaatggactgtcaaataatgagctgtttctgattatgttttccaatgttcaatgaaaaaagacaagggcggcaaatgccgaccccttgtctttttcgtttagtgtatgctcctatcaaaaaacgccagacgagcgtcttcttagtaatcacaatctttatctctgcattctttcttacttacagcgtctattgagtgccccatgatcttgtcattggccttatcataaataccatcgaatttattcgatgtatcatcgttgtaatagccaaatacctctatcccgcccattggatctgtttcgtatttatctttaaatgtaacgttatgtattccgtcgtagttcgctttgataaatttctccattcgttcttgagcaatctttatctcttcagcctgaacatttttatcattcatactcttcattataaaacctccggctgctattaagataatgaagataataatatattttttcatagaactcatcctttccatgagttatgatgaaactcgcggactagaaaaatggtggtgacatccggtgcattaattcatacaaaaacagacgctatttaggcgacttaaagtttttcttcaatgttcacagcggatcatataaaccggcaaacaagagaacttctttattttgcgtcttttagtattcacattctttttcctgacattcgggtttctcttctgcatcgactgacgaaactcctatttcagcattcgttttgtcataaagtccgaaaaattctttttccttattaccattcaagtaccccttcacggaaataccacccataggatttattttataatcgttaatgtatgtaatttgctttatatttttgtaattagcttttatatagctttccattttatttttcgcttggttaaaaagttcttgctctgcttcttttttatcatggtggtacttcatgtagatacttcctgacgctatagttattacaaatatcaggacaaccatgtatttcttcacagactcatcctttcttagattaaatttacatcaacctcagagtgttgtacatgtctaaaaaaacatcaatgtatcaaatatcagtgatcgagattacttttatataagcgttagttagactatcctaaaagtgtgcgaatttctacaaaagcttatagttagatctagatttaatgaagttatgaaggagaagggaattcaaagccagaaggaattggctgatttagttggttcaactgaggttacgataagcaggtttaaaacaaatacaagatatgatatcacaacactattcattattaaattagaggaagagcaatacaacaaaattagtccagctcgattgagcaggctaatttatcttgtacaaagcttatctttacattcttcttttggttcggcatcaaccgtatatgacaatatttctttattgcctgggtcatatagaccttcaaactctttttttccgttagtataacccttaacactaataccgcccattgggttaatatagtaatcctcagaaaaatcgatatctttcacatttttatagttcgttgttaaaaactttttcatatgattctgggcttcttcgaataatgcaatctctttttccttttgatcatactgatgcttcataaaaagtcccccaactgctacaattattaaaataaagataattatgtactttttcatttggaaatcaaccctttcctataaataactgtcgttcttaagtaaacgaaatgagcgaaaacttgatatgaatatactttcagcatgtcaaaagcaaagctaaccaattcagaattcatcgcgattgttgctgacaagttaagattggaacttaaagcgagtaaaatgctatctgacgtttttcctatcgctgagttgtcatgatatttgtacgcgtttactgttaatatcggggatacctcgacaaatgagacggtagaggcgattgatctcaggaataggtttgaactgtatgagaaacatatcacgaattttgtaagataattaaacaaaataaatacccactcatccctgaggtgggtattttacctttcttcggcattgaccactgaaatacctatctccttgttcgtcggatcatatataccggaaaattctttttctttattattatttatgtagcctgaaacttcaactccgcctgtcggatcgatattgtagtcttttgaaaaatgaacttcctgtacatttttatagtctttttttaagtaattcttcatgtgctcttgcgcctcaatcacaagtttttcttcgtttttatgtttatcatattgacgcttcacgaaaaaacctcccactgctataattataacaattaggataataatgtattttctcatgcgtatcatcctttcggaactattttacaatataagaaaggtgatgtatatatgccaaaaggaaaagaaataaccgtctctaatgtcacagataaagaatattaccgtttgagtcaagcagcttacaattataaaatgttagccctgcatatgaaatataaaactccttataaaataagtaagacgtcatattggtacgttgagaaagtgaagcaggattctgatacgggtcttgatgcctttgtattctcaaaaggcatcaagtccaaaaacggaaaatggacaaaatcaaaaaaccccgaaaacgtggtcgtcgcatttgcaggaaccgatatcggaaaagacccgatcaatgacggcgtaaaagcggacggcggcaatattgttttcggaaatgatccgaaaaaagaagtacattatattgtaaaaaaagacgcaaaggatacatcaaaaacactcggagcctatcacggaacgccctctcaagacgccatgctcacaaccggaaagtataagctgataacgaaaacatcgcaaatcgatcaagccgatcagctggtacgcagcgtaaagaaaaagtatgccggaacgtcaacgattatttcaacaaccggccattcactcggcggcgctgaggccgaatacagcgcggtgaataatgatgtgtatgccgtcgcgtttaacagtccttccgtcgtgaaactgcacgatgaggaaacacagaaagacatcaacagcggcatttacgatccttacatccggtcaattatcaatccggacgacatggtcggggcgggttattggaacgaatacgaccgccacaacgggaccacaatttacacgaaaaacccctcgctctcacagttcagccggaagcagcggcttgatgggaaattgagcgagcagatcggaaaaaatctcgcttatttcttcactactgtcattctgagaaatccggatacacacggcttaaacgaagcaaatttcgtgttcgatagaaacggaactatcgcaaatccgaacggagatgaattagtctttgacaaaaacctcggcgctcttctgccggccggtgcgatcggaagcggagacgcgataaaagtaacgccgacaaacgcaaagaagctggctgaaaaggtgcaggctatgactgaggatttgcggacgatgaaaaaagaagcgcagaacgcctatcaggagcacgatgaaaaaatcgccgagctgaaaacagaattctacggtcaagtcggacacggcttgtttgaccagcttcaagcacaggacgtgaccaataccattgaagatattgcgctatcttacgagaaaggcccgattttttacgacactcaggctgagcaggcgtttattgattctttgcaggcggcaatcacggacctagaagagatcggcggattcttacataaaatagcagacgaatttcagaaaaaagaccagatgctcgcaaactggttaagatgatagaggtggatacataatgccgacattagacgaacttttagaacacaaggacgacccgatgaagaaaaggctgcagcggcagatgctgaaaacagggatgacgcaggcagcggggacaaaactggagacagtgcgccgaacgctgaaaccgacattcgaactggatacgttgaaagatgaattatatgaagtgtattcagcactattgaacagctttgaaggtaaggcgcaaaaagctctcgcgcagcggatcagtgaaagtgccaagcttattgttaatgtggagaacgacggagaaactttcgttaatagctttaaaacgagataaaaagcccctctgcaaagcaagttaagtatgaaatgaacgaaaataataaagatgtgattatcgagtcattaaagcggaaagttaatcgactagagcatgaacaaagatttttgaaaccaattaaaagtagcgtagcagaagtctacaaaaatttctagttgacaaggtatttattatttaacaatcaagattgtttaggaatcttgtatattaaactcaaaagttatttaactaaagataagagggtataaaaatggataatgaaacagccaaaaatattagagaaagtttaacggctgattgtacgaagtgctttggactttgctgcacagcgcttaatattgtagcatcaagcgattttccaattaacaagccagcaggtgcaccttgtgttaatttacaatctgattatggttgtcaaattcacagcaacttacgagagaaaggttttaagggctgtacagtgtttgactgtttaggttctggacaagttgtttctcaaattacttttaaaggtcaaagttggcgagataatcctgaaattagagaaaaaatgttccgagtgtttccgatcatggaacaaatacatgaaatgattgcgtacacggcagaagccttgtcgtatgacattccccatgctttgtctgataaattgagtgtgcagttaaaagaattgcagaacttaacaaaactcgatgctgaagaattattatctcttgatctagtggtgtacagatttccattaaacaaattgctttcggaaaccagcgagtatattcgggaaagcttaatttcaaagttacctgacactaaaaatgccaagaattataattacgaaagagccgattggattggcaaaaaattaagaggtaaagatttaagggcgttagatttaaggggagcatatttaattgctgcagatatgaggaatgcagatttaagaggtgttgattttattggcgctgatttgcgtgatactgatttaaggggagcagacttatctacgagtatgtttttaactcaaatgcaaattaattcggctaaaggtgatgtaaagacaacattcccctctcatatacaacgaccttcccattggattaactaattttgttcagtttgagtattaaaggaaactttttgaagatggtcttactatcagtcttaggaaagcacatattagtcatgaataatatatgctttatgctttcctttatttttgaggatttttataatttaggtcttgataatactgtgccatccggtatctgtagcgtgtggagttcggggaatttagctttccgatataatagacgtaggctaggacgttctttctttcggatttatttccgctggatggcgttcttttttttgtttttaaatctttaacgtgtcgtttcgacttgcttttctgtattgctcgattacgatatcgtctacataatcgagatatatttctgtagaagcgaggtcagcgtgccccattattttttgtagcgtttctcagatagttaatcgcaaaggaatgtcgtaagctatgaaggctcggtcggcattccttttttaaatccgccatttccccgtacttcgcagctctcttccgcaagtgatctttcgcaatcttctccccgtactgattaacgaagacatgcgtaaatttaccgaaatactccgtcatttccgttagtaattgccgcaactcttccgcgacctgttcagtcatcggtaccattctgttcttacggttcttgttgacggcgcccggcagcataataacgaggttgtcaaagtcgatatcttccggcttgagtccttcaagcgagcgaagcccgcacttcagcgcaataaggaacgctacataatcgcgaaagcccggaaacgtatctttatcgatcattttaaagaaacgccgcacttgactatccgtgagcatttttattgtcttttcatcgacttgcagcttcgttactcttttcgctggattctcgtttagaagtccgcgcttagtcattcggctaaggatcgactttatgccgcctaaacggatatttatcgttactggcgaaagatcgcgtacgttgagcatcgttgtaatataagaccgcagatgatctttccgtgaggtccgtcacgttatcagacggcatgataccgactacctccgtgaatttggcccaatacttccgataatcattgatcgttctatcgcgatagttctccgtttcaaatagctcgtatacgatccctaacgcttcgtgaacggatttcgtcgctttgaagctctttactattccgtcagtctcgcgccgattcctgacgccttgcctacgttttaaaatcgccataacaaaaaacctcccggatttatttatccgtgaggttacgtttgctgaatcggactgtttcgttttaggagaagcgagctgaccgattaaagccgggcccgttctttaccggttcgcgcccttccggacacttttcgtacacttaacgcttaacggaccgtcggaaaacgttgatatgacggggttataacgtattggacgcgctcggagggattcgaacccccgacagacgtggtaccggaaaccaccgctctatccaactgagctacgagcgcacgttttttcaatcagatacctttatattataataaagaaacgcgcagaaagcaactcttttttgataatgcacaacaggattatgcagcgtcctcatgcagcataatcctgcatcgtttaacgtcattgattttcacaaaaaacttatttcaggcggactgcccccggctcggtacatttccacccactgcagaaaaagcggtaatcacccgtttcagcttcttttccaaatgtcctttaacgtccaataggtgaattcctcaacctttacggcgcctttctcagaaaacagctcaatccccaatctgccttcattcggatagatacggcttgtcatcgttgtttctccatgattggcgaatacttcaatcgaggatctgtcaataaagatacgcagcgccagcttgccgtttgtatccgtctgcacccttctcacaccgtctttcgctttccccatcttggtgcaatcaagtgtcagctttttatccgttagattgtatgtcagcacaagttcttcttcgtctaggccgcgaatcttaaaacctgccgtttcggcatcagaatcgtttacatcaaacacggctcggacttcaagcagatcttccgacgtctttgccaagtaactccctgaaaccgatcgtccggcacattcccgatattccattttccgcagctgcttggtttcttccacgggattcatcaaaagtttatgatcatcacgcaaagtcagttctcgcggcaaagtcagtgcaccgcaccatccgtccgcttttgtcggcatctcagattcccacatatccatccagccgatagcaattctgcgtcctttatcatctaataatgtttgcacggcgtaaaagtcatggccgtgatccagttctttaaaagcgccgtgtgtaaatttgtttgtttcatcatgatagtcaccgattaaatagccggtttgatgtaaattttgataggaatcaccgtccgcctcgatcccctggggcgaaatcagcaggacatgcttgccgcctaattcaaagaaatcaggacattcccacatatagccgagattaccgtcactttgggcgagaacacccgcgtattcccaatcacgcaaatcaggtgaacggtataaaacgacccgtccgacgttttcttttgaagagttgccgatgaccatataccaaacatcgcgatgcttccatactttcggatcgcggaaatgacgggcgctgtcttccggcggttccgcaataacagggttttcctgaagcttttcaaacacgattccatcttggctgacagcgatattttgagtttgatagaataggtctttctcttgatcaattatattatgtcctgtatagatgagggctaatcttccatgatcatcgaccgcgcttcccgaaaaacagccgctttggtcgaatgcatcgcccggagctaaggcaaccggcaggtgctcccaatgaatgagatctttactttttacatgtccccaatgcatcggcccccaatgctcatcatacggatgatgctgaaaaaagacgtggtattctcctttaaactgaataagcccgttcggatcattgatccaattcgcccggggcataatatggtaccccaatcgatatctttgtttcactttaccctcggcttccttcagagcttcttccgcctgctgaattctatccatttgtaacatcctctctatccgattttttgcagacgctggacacgcctgctgttttgtttcgggcccaataaagtaaatatggagatgacggtaaaaccgaagacgacgattcccatgatgagataggtttgacggaaccccgcactgtcatataatcctcccgcaagcggcgacagaatcgacgcgcctgcctgagatgcgaattgaaaaccgacgagataaaggacggacgacagacgcgtatcaaaattggcagccaaatatttaaaaacggcgatcagcataatcggcaattccagtgcgtggatgagtttcattgatgaaatgcctacaggctcaactgcaattccggacccgacgatgcggaaagccattaaaaaccccgctaaaatcaaactgtttttcgccccgaacttattgacgataaaaggcgcaagaaacatcatgccggcctccaaaaacacctggaatgaattaagatagccgaatacttggttacccgtcgacactgaaggaaacaaagacgcatagtagatcggaaactgctgatcatatacgccgtaaatgcaagtcaccccgataatgtacagcataaaaaaccagaaatctcttagtaaaaagagccgccccacgtcttttaaccggaccgaatccgctctgtttttctcatgatcggtcatttctattttcacagacatgataatggccgttaatatgacggctgaaacagacgcgatccagaagttgatattgggattgatattgaaaagctgccctgcaaaaaatgcagccgccgcccagcccagcgagccccacattcttgatctaccatactcgaaatcatacttacggctgaccttttcaatgtacgtttcaatcgcgcctatccctgccaaaaaagcggctcccaaatataagcctccgacaacggcgccaagaaagacgttgtattgtaaaagcggcccatagacgaagatataaaacggacccgtgaatatgagaagacagctgatcataaacaatatctttttcttcagccccaatttgtcagagataaaaccgtaaagaggctgcatgcagagagcaaatacggcgtttacagaaaagataatgcctgtcgctgatccgtttaaattgatttcctgccctaaccaaatcgcaaataaagaatagctggaagaccaagtaaaaaagaaaaagaagaaataagcactcagtttccaatacagactttttgagcttttcatttgcaccgctcctttaataggaccttttaatagccgttttagagccgcatacttccttcttcattttcatcacatacatgcgatctctgagtaagcgcttactttctatcgctgcttaattctttcactttattgccgccagccatctctccatacccgtcacttcccttcactccgtaaataaagcgctttcaaaaagaattgtatgtcaaccggttccatatgtcaatcggttgacatacaattttctgattattttaatcaaacaaaacgcaccctctttatatgaaaacagaaacacggaatgtccttgcacatgtcagcctgattctctaaaataagtgcgtgacggaaattgtaagccatttcagtaagcaggagggcacgggaatgaagcctaacattcatgatgttgcgaaaatagcgggagtttcatctacaaccgtttcgcgggtattaaataaccgcggctatatcagcgaaaaaacaaaagaaaaagtgtacaaggcgatggaagaaatcaattactttccaaacgatctggcccgctctttattccgaaaacgaaccaatttaatagggcttatcatcccaaactccggcaacccgtttttcggcgaactcgcctttcatattgaaagcatttgtacgtccatgggctacaaactgctgctttgcaacagtttacatcgaaaggataaggaagaaaaatatttggagatgctgataagaaaccaagtggacggcgtgatcgccgtgacttacaaccggggaattctcaattatcacaagcaaaatctgccgattgtcgccattgatcattacttatcggacacgattcccgtcgtcggctcagacaactatgacggcggaaaaaaggcggcagaactgctgattgaaaaagggtgccggcacattgtccatatcaacggcccgattgaactcgaaacaccggcaaacctcagaagaaaagcatacgaagacgtcatgcatgaacacagacggaagcctattacatatgaagtacccttttatcagcattaccatgacattatttcaacattattcgatgaacagcccgacaccgacggaatttttgccagcgatgatatcatggcggctgcagtgatgaccgaggccaaaaaacggggaatagacatcccgaatcaattaaaagtgatcggttatgacggcactgaaaccgttcaatcggttctgccggacttggcaaccatccagcagccgattgaattgatttccaaaacagccatcgagattttagcaaaagaaattgaaggcgaatttgatgatttgccgctggaaacgtatttgccggtacggcttttggaagggcggacaacgtagtcagacccttccaaaagccgtacgtagcgacgcgattgcggtctattttgagcgctccggccatatcattttctcaaggctccggcattgatcatcctcatttccactttgctgtttgaactttttgttttatgggaaaaatggtgttagaagaaaaggttggcattttggtcagcgttttgtttgacctttattgaccaaaaatgtatcatgtaaatacatacttacctaaaaggtgaaggaggagcattatgaatttaatacctacagtcattgaacaaacgaaccgcggagaaagagcttatgacatttactcccgtcttttgaaggaccgtattatcatgcttggatctgcgattgatgacaacgttgcgaactccatcgtgtcacagcttttattccttgaagcggaagaccctgaaaaagatatttccatttacattaacagccctggcggatcaatcactgccggtatggcaatctatgatacaatgcagttcattaaaccgaaagtatccacgatctgcatcggtatggccgcttctatgggagcatttttacttgcagccggagaaaaaggcaaacgttacgcgcttcctaacagtgaagttatgattcaccagccgcttggcggagcgcaaggacaggcgacagaaattgaaatcgcggcaaaacgcattctcttgcttcgcgacaaattaaacaaagtgcttgctgaacgtaccggccagccgcttgaagtcattgagcgcgatacagaccgcgacaacttcaaatcagctgatgaagccttagaatacggcttaatcgataaagtgctgacacgcaatacagaagaccagaagtaatgccaaaaaaacctgcaagagctgatgtctcttgcaggtttttttatgctttattcccattcaaaaaagtaatgaatgctttgacgacagataattctaacgctgaagaattatacataagccaagtatcgcgtatcacaggctcgttatttttataggatagcgccaatgtgtataattcatcagaaggctgaagacagatttccggcacaacagaataaccgagaccgtttttcaccatctctttacaggtttcctgcctgtctacctccatcgcaatgaaaggcggttcagtaaattggttattccaccatttttgaatcaaacttttcaaagaagcatcagtttgataataaatcatcggcaatttgggaaggtcctcactgttgatttcagtttttgaaataaggtacagccgctcttcatttagcagttgtttttccccttgccaatcataatttcccctcataatcccaaggtgtacccccgaatgatgaagcagatccatcaccttcgcactccatcccgtattgacgtggaattgaacagacggatactgatcagaaaaccgttttagaatcgccgggagcttatactgagcaaaattgcttgagactcctaatctgagaaccccgctgacttcatggctcatattgagcatatcatccttcactcttctgaattcctgcagcatctctttcgaataatcaaccagatgttcaccttctgaagtgaactccatccctttttttcttttataaaaaaggcgcactccgaattgtgcttccaggtttttgagccgataacttaacgccggctgtgtcatatataatcgctctgccgccttcgtcatatttttttcttcgaataatgtaatgagcacaatccaatccttttcatccatatgaaatcccccaaaatatttttctgctataaaatttcctcctattataaaagttttttattcaactttataaaaattatatgttttacttataatccttatttatcatacgatattttccaaagggaccggtacctttttatccacacaaaatgatgtaaggatgagacagcatggaaaaagttcctgtaaccgtcatgagaggcggcaccagcaaaggcgtttttattcatcaaaaagacatgccagacgatacaaacctatggagcgattttcttttagacattatggggagccctgacgagagacaaattgacggtctcggcggcggccattctctcacaagcaaggcagccattattaagaaatccgccagaaaggatgcagatgttgagtatacgtttgctcaggtcagtttgactgaccattttaccgacttcaaaggcaattgcggaaatatctcttctgccgtaggcccttatgctattgataaagggctcgttcaagctgaagagccggttacaaaagtcagaatgttaaatacaaacactcaaaaagtgatcgtagcagaagttgaagtcagaaatggaacatttcattaccagggggactgctctatccccggggttccaggtacagcttctcctatttatctttcatttcaccaggctgaaggagcggtgaccggtaagctgtttcccactggtcagcctattgatgttctcgatacaccgtatggaaatatctcggtctcgattattgattacgctaatccgcttgtctttgtaaaagcagaggccacggggcttaccggcttagaacttccggatgaatatactccggatatattggaaaagctcgaaatgatccgatcgattgcagccgagaaatgcagattcgctccgagacatgaggctgctgcaaaatcaccggccgtaccaaaactaacattaatctcatctccagcggattatatcgatacaaaagggataaagagacacgcagaagagatggatcttgtcattcgtatgatgtccatgcaaaaaccgcatcaagctttagccattacaggggcggtttgtacgactgccggcatgctattgcaggatacaatattatctgaattttcattctatggcagaacgattcgattgggacatccaagcggcattttagaaaccgaggcagatgttgatccggatggaacaacgattaaagtagtacgcacagcaagaaaaatctctgaaggctatgtgtttacaaagcaaagttacaacctgaatacgctgaatcacattggttaataccagtcttcagacaagtcaaagataaacggaggaatacgagatgatcaatgtaaatgcgtctaatcgattaaacagactgcctttttcaagggcccatcaagcagtgctcgttatcctttcattcgcttacttttttgattttatcgatttaaatacgttttcatatgcggcgccttcacttttaaaggaatggaacatttcgactcataccatcgcttttattacgtctgtctcctatttcggaatgtttatcggcgcctctgccggaggatggttttcagaccgtttcggaaggaaaaaaggtttaattctggttgtcacttttttctctttcttctccctcctctcttctctggcttggaacccagaaatactcggtgtttttagatttcttacgagtttaggtatcggcgccacaacgattgtggcaagtacgtatatcagcgaatttttcccatccgcaactaagggtaagtaccaggcaatctgtattacaatcggcatatgcggaattcctgcagccggctgggtggctaaattggtcgtgccgtccgcctcttacggctggcggtttatctttctattcggcgcggtcggtattttttttccgctgatcgccagaaaactggaagaatcaccgaaatggctggacacgaaaggaaaaagcgaacaagcacaccgcattctgcttgaactggaggcaaaagcagaaaaagaaaagggtgaactgcctgaaccagctccggctctgcgaagcagacaaaccgctgtaaaatccgtaccatatcggacgttatttcaaaagcctttggcaggaagaacttttgttttaatgacgatgtgggctgcttccacgattgcaattcaaggctttggcacatgggttcccacccttttggtaaaagaaggcgtatcaatggatgagtctatcgtatacgtcactctgggaacgatcggtgccccgctgggcgctctcattgcgtcgcaaatctctgaccgtgtggatcgaaagtgggccatttctgttttatcgttaattattatggcgcttggattcttttatggcatcaatcctttgccgatggtcattgtcatatgcggatttctcatgcatatgtttgagcgtactttcagttcgatcgcatatgcctatacgccggaattatatccggttgaagccagggcgtctggaaatggcctcacttacggcgtaggacgtcttgcgaatgtagccggtccctttgtcgtcagtttcctgtattcaggctacggatttttaagtgttttcttgttttttacaggctgctggtttctttgtgcactgacagtcggtatatttggaatcagttcaaaaaaacaaaagatgcagcaggatgatttcatatcggaggaaacattcgtgcaacaaaagttgtaaacgcatacagtctgcaaaccgcaaaacatccatctcctctgaggaaatggatgttcttctttcaaccccaacagcattctctttctcatcttattctcatacatatgtcttatcctgaagaaaggtgtgatacgtatgagaaagagaaaacgatttccagaaagaaaaggtattctataggcggagaattttccatcagaatagattagatgcaaccgccgaaacatatttcagacctctgacttacaattcccgccatttcttatctaaaatcgggtatgtataccgattcatctgctcaatcagctcatccggccgggaggaactgtgtatcagcttcaaatgagactcattcgaaaatccttcctgaatgctgtacttgaccatcttcatcatcggctcaaaatacccgttcacattgtacagtccgatcggtttttgatgaatgccgatttgcgcccagcatagcacttcaaataactcttcatatgttccgaagccgccgggcatggcaatgtacccatcggcaagttcactcattttcgctttccgctcatgcatgccgctgacttcaatcagctccgtcagattctgatgaacaacctctccgctgaacagcccgctcggcatgacgccgacagcttttccgccgcctgccattaacgcgtcggcgacggttcccatcagaccgacccgtgaaccgccgtaaacaaggccgattccctgctccgccatatattcacccagttcggccgctttgcgtttgtactcttcatttacccccgggtttgaccccgcaaatacacaaatggttttcattttttcatctccatatctatatatgtacatcaataaatcaaaatacactatatattgtcccatctctatatgataatatcaataagaatcatacaggacataaggagtgtttcacatgcagatggctgaagcagaacaatggacgaaagatttttatgaaaaacgaggatggacggcgtacgggccatttatcagaatcggttttttaatggaagaggcgggtgagctcgcccgggcggtaagagcatatgaaatcggcagagaccggccggatgaaaaagacgcgacccaggctgaacgcaggcaggagctgattgaagaaatgggtgacgtcctcggaaatctggccatccttgctgataagtacggcatcacgttagaagatgcgatgaaagcccatcaggaaaaactgatcaagcgctttgaaaccgaataaaaacacggcctgtccgctttttcatggacaggccgtatctgaatttatcccgttatctcgtcctgatgctcaaagaaatgctgtttcccgattttatgaaacagccccgtcttccggatgagctctctcggctgtgattgcaatccgacgatcatcaatctcccgttatgccgtttgatccggttcatcacattccccagcaccgcttctgcggaggtatccatgtaatgtacattattcatcagcagaataagcgtcttcggcttttcctgaagcctctccagcagcgatgtttccagtgaatcaattgaaccgaaaaacagcggcccttcaatggaatatgtgctgacggacgaatcatttttaaccgatttgacagcggcatgcggtgttttgatacgtgttgattcgctcatttttctgataaagaaaacaaaagcgagcacgagaccggcagaaacgccgatgattaaatcaaacagaaccgtcagcaaaaaggttgccgccagtacgaatgaatcagtgtttttcagccgcatcatattggcgacttccctccgctcactcatgttccaagccacaaccatcaataccggcgccatgcttgccagcggtacgtgaacggcaagcggggcgaagacgagcaggacgaggaggacggtgactccgtggacaacaccggaaatcggagaaactgcgccgtttttaatatttgttgcggtccgcgcaatcgctcccgttgccggtataccgccgaaaagcggcgctgccatattggcgatgccctgcccgacaagctccctattgctgtcatgccttgatcctttcatattgtccgcgaccatcgccgataatatggactcaagtccgccgagaagcgcaatgatcagagccgacggaaacatcatgatcatgttatcgattgagaaatcaggaagctggaaagccggaagctgccgcgggatttccccgtaagcagaaccgattgtcgccattttgtcaggaaaaaacacgaccgccgcggctgtagagacaagcagcgccacaagcgcgcccggaatcttcggcatcagcctggctgataacagcaaaatggccaaagcaattcccgcgatgaggatgctgtacaaattaaaggttccgagcttcttgccgatttccgcaatgttgaggataaagctttcatgcttttggatatcgcgcagaccgagaaaatgggcaatctgctccgagaaaatcagcaccgcgattccggccgtaaatccgacgatcaccggcttcggcacgaatttcataatctttccgagcttaaatacgccaaacaggacgagcatgacgcctgccataaaaccggctacgagtaaattctcaaaaccatactgcatcacaatggcaaataaaatgggaacaaacgcccccgtaggcccgccgatctgatatttagagccgcccaacagcgaaattagaattccggccacaataacggtgtaaagcccgtattccggaccgacccccgaggcgatggcaaaggccattcccagtggaatcgctacaattccgaccacaattcccgcgactaggtctttctgaaatttctgtaaattgtatccctgatatctgccggtaaattgcatcgtcagctgcatcctcctttgactgtttcataaccgtcaacgacaacatccaacgtccccgtccccggatcaatcaccagcccgtgcaccggcacttcttcaggcaagagcggatgatgcctgaccatattcacgctgtgggccacgctttcttcgacgctgtgaaagccggtcagccatgtttccaaatcgactcccgcatgctgcagaaggctgagacatttgtcttccacgccgcgctctttcgctttatttaatatggaagccgcatttaatcccgacattccgcactcgcggtgacctatgatgcagacttcctctgcctgcagttcataaacggcaaccaaaatgctccgcatgacacttccaaatgggtgagaaacaatggctcccgcgttttttatgattttggcatcgccgtttctgagtcccatcgcctgcggcagaagctccgtcagccttgtatccatgcaggatacgatgacaagcttttttttcgggaattttgtcgtttggtaaggttcatatttcctttcttggacaaactgctggttgtgctccaaaatgcttgataaagaaaccatttttctattcatctcccatccgattgtattgcaagccttcttacccagcttacagtaaggaattatagcacagaaaaaggcctcaaaagcgctttcaaaaaaagacacgataatttgactgtaaattcagattatgttcatttatatctttcaaaaataataaaatttatctttacaccaacctataaagcttttgaaaacagcggttccgctcattttgccttcagaaatataggcggattctgttattgtttggagaaatcaagcatgtacatttctttttctttcattttaagttcaaaagaaccagaaatttatcgtgatgcgtttgaatatttctcacgttaccgcttctcttatataataaaatagagaagaaagacaaaggaggagaagcccgttgaaaccctatgtattcatcgcgaaaccggtaccgccggaagtcgagcaaatgataggcgagcattgccgctatgacatctggaaagaagataccattccaaaagaggaactgtacgaaaaaatgaaagatgctgaagggctgctgacatccggaacggcgattgacagtgatttactggatcacgcgccgaagctgaaggtcgtcagcaataattctgtcggctatgataattttaatattgaagaaatgaaaagacggggggttgtcggcacgcatacgccgtacaccttagatgacactgtcgctgatctggctttttcattaatcctgtcttccgccagacgggttgccgaattggatcgattcgtccgcgccggcaaatggggaaccgttgaggaagaatctcttttcggtatggatgtccaccatcagacattaggaattatcggcatgggcagaatcggtgaacaagctgccaaacgggcaaaattcggcttcgatatggacgtgctgtattataatcgcagcagaaaaccggacgctgagaaggaactcggggttacatatgccgacttagatacactgctgaaaacatcagactttgtgctgttaattacgccgcttactgacgaaacgtatcatatgatgggagagcgggaatttaaattgatgaaagatacggcatgtttcgtcaatatttcccggggaaagacggttgatgagaaagcgctcatccgcgcattgcaggagggctggataaaaggcgccggtttagatgtgtttgaaaaagagccgatcgccgaagacaatccgctcctgcagctggaaaacgtcacattgcttccgcatatcgggtcagcaacggcaaaaatccgtttgaatatgttcaagcaagccgcacaaaacatgattgacgccgtatacggaaaaacgccgaaaaacctcacgaaggaatttcaatgagatgaaaaatcccggccgtttcagccggggtttattttttgctagatcaaaagaactatttttaaattctttctattcctttctctcgatgctgatacaatgaaaaggaatcagcttcacatgataaaaatgggaggtattgctttgaaaaaacgattatcgtggatttccgtttgtttgctggtgctgttctccgcggcggggatgctgttttccacggctgccaagacggatacatcttctcacaaggcgcacactgaagcacaggttatcaacacgtttgacggggttgcggattatcttcagacctatcataagcttcctgataattacattacaaagtcagaagcgcaggccctcggctgggttgcatcaaaggggaatcttgcagacgtcgctccggggaaaagcatcggcggagacatcttctcaaacagggaaggcaaactccctgccaaaagcggacggacgtggcgtgaagcggatattaactatacatcaggcttcagaaattcagaccggattctttactcaagcgactggctgatttataagacgacagatcattataaaacctttacaaaaatgagataaacacatacaaaaaacggcttccctgcggaggccgttttttttgcagagaacctgcgagcttcatataaaatgagcagtaaatttttcttcaaactctgatcggtctattctgctgttctccgccgtgccatcgtgtttttttattgttatattgcgttcagacagaaccatgtgcccttccggtgtccgcttagaagcaagcaggcgtttgttgaaaggagagcgttcatgttcaaagattgtttgtttcatagacttgaggtccttttcatcgatttcttcaagcgaaaatgcgtaacctgtctgccagccgtcccctttgttcatttcaagcaggtatgtcccgaattccgtctcttctatcctcacgcggaacgctccggccgctgataccgtctcgtctcccgacatcggcacaggctgcatggcgagattgaggccgaagcctgcatcagcgatgtactcattccccccggcggaaagaagtacggccgcatgtgtgccgggcagcgcccagccgtttttccagaccgttccgcggatcaatttgacatcaaatccggcatctttcaggatgaaataaagcagtccgttcaagtcataacaaaggccgccatgaggttccttcaccatgtgccgccacagtccttctttcgtgacgtcatattcttttttggacaaaaccgcgcgattttcaaacggaaaccgatatgcgagcgcctttaaaaactccggcaggttgctgaaatcgagggaatccttttcccagcctatcgtttgataacaatctttcagaaactcattcatcgttccgtcccccttacaaagtgtttacacttcttcctgcacataagcggacaacttttccagcgcttccttttcatcgtcgccttcagcgatcagagtgacttccgtccccgtgctgaccgccagactcattaatcccataatgcttttggcattcactttcttgccgtttttctcaagaaacacatctgatgcaaaacgatttgcctcctgtacaaacaatgcagcgggacgcgcctgcaaacccgtctttaaacgcacttccactttctcctgaaccataagatctccccttttctgtacggttatttcaaagtgatgctttgtcctgtacgcagctgttctgcgatttcatcgagctttctcagcctgtgattgatgccggatttgctgattttcccgcttgcaaccatttcccccagttctttcagcgtgacctcctgataatcaatccgcagctgcgcaatttcgcgaagcttttccgggagcgcttcaagaccgatccgttcatcaatgtatttaatattttccacctgtctgagagaagcaccgatggttttgtttaagtttgctgtttcacaattgacgaggcggttcactgagtttctcatgtctctgacaatccgcacatcttcaaaacgcagcagtgaattgtgagcgccgatgacattcagaaattcagtgattttttccgcctcttttaaatacgtaatatagccttttttccgttcaagcgttttgctgttcagatgaaattcattcagcagcgcgcataatgaatcgttatgttccttataaagcgagaagatttccaagtggtacgacgatgtttcgggattattcacagatccccccgccaaaaacgcccctctcatataagaacgtttgcagcagcgtttcgccaccagttcctcagaaatattccgttcaaatacaaagttctctccgaggattttcaattcctctaaaatcagctttgcattttcagaaaagcgcacaatataaacattgttttttttcagccgcattttttttctgactaacagttcgaccgatacatcatattgtttcttcagcaatgtataaatacggcgggcaatcgccgcattttcggtttgaacgtcaagcacgagatggcggtttgaaaatgacagtgaaccgttcatccgaatcagcgcggacagctccgccttggcgcagcagtccttcacttccagattcgtcagttctttttttgtttccgatgcaaatgacatattagccacctcatttcaaaaggcctctagtcccttaataaatcgacaagaagagaagccactttatgtgtatcgtgacggattacgccatttttatacgtgataatctgatccctgatgacctcaagccccatggatttcagcttttcaacattgaagtcgacgggccgggccagctctttcgcatatttgcttttgatttcgtcagggatctcctcattgttgattaagatcgtgtcgataaacggctgctccatatgatcgttcagcgccttgacatggtcggccgcactgtattgcagcgtctctccgggctgtgtcatgacgttgcatatatatacttttttggccgcagccttgacgacttcctctccgattttcggtacgagcagattcggaagaatgcttgtgtacaggcttcccggaccgataatgattaaatcggcctgacggatgacgtcaatcgtttccgggagcggatcaattttttcaggcgtaagaaacacccgtttaatccgctggccgtaagaagggattgtcgattctccggagacgacctgcccgtcctccatttcagcgtgaagaacgacactggtgttggcagccggcagcactctgccgcggacattcagcaccttgctcatttcggtgacagcgtgaaagaaatcaccggttatatttgtcatcgctgccaaaatcaaattgccgagcgaatgtccggttaagtcgcttcctttgttgaaacggtgctgaaacagattttcaacgagcggctcaacatctgacaaagcagccagtacgttacggatgtcacccggcggcggaatttgaagttcatcccgcagacggcctgaacttccgccgtcatcagcaactgtcacaatcgccgtaatatcaacgggcttatgctttaacccccgaagcagcacggacagaccagttccgccgccgaagattgcgattttcggcttcttattcatttccggcttctcttttcaatgtcccggtgagtgacatgagtatagaaatcttttttaaaatagtcagccaaatattcagcgagcgtgacggagcggtgctggccgcccgtacagccgatcgcgatgacaagctggcttttaccttcccgcttataagacggaagcataaagccgagcagatcaacaagcttttcaataaacttttgtgtttcgttccacttcatcacataggatgacacttcctcatctttccccgtaagcggcctcatgctttcaatgtagaacggattcggcagaaaccttacatcaaacacgaggtcggcatctatcggaagcccgtatttgaaaccgaatgacatcacgttcactgtaaatgtttcaccttggttcgtggcgaaatgcgccacgattttttcacgcagatcacgcggtttcatatccgatgtgtcatagatcagctgagagcgccctttcaattcttcaagcagctggcgttccagcgcgattccttcaagaggaagcccggtagcggccagcgggtgagaacgcctcgtttctttgtatctcgtcacaaggatggaatccttagcgtctaaaaagagaatgcgcggtgtaatccacggattttccgccatttcatccagcgcctcaatcagcctgtcaaaaaattcacgtccccgcagatccatgacaagcgcgaccttgctcatttttgaacttgattctttcatcagctccaaaaatttcggcagcaaggaaggcggcagattgtcgacgcaaaaatagccgagatcctcaaagctttgaatggcgacggttttccccgctccagacattcccgtaatgatgacgagctgaatatcatggttttcattcatactcatctttctcccccctgcggtctttcttttatttgataagctgcggatctaaacgatagctgagcagctcgaagtccggcgtatacgtaaaggtgccgtgcaaaagcccttggcccttgatcataaaatcaaggatatgcccgtctccgggggccatcggaaggctgtggatatcttttacgtcatgccacttcagaacgccttcctctgattcagcgacatttcgccccgtgtacgagtcggcgacgaaagtaaacatcatccactctgacacgatttgttcctgttccttaataataaaggtaaacacgccttttaactgcggatttagtatataaatgcccgtctcttctctgtactctctgatgacggaatctctgacggattcgccgctttccatcttcccgccgggcgcgacccaccagccccgtctcggcttttggagaaggagaacctgatcatctgtctgcagcacacaatttgtcactctttgcacaagtacgtcacctaaccttctcaacaaatcatcgtctcttcattataccgtttcggcatgtctctcacaatgcagagacaccgacatccttttcttttatttgacagaaaacagaaaatcgcaaaaaaagggcacggatactggaatccgtgccaaagtgtattcattaaaaagggggtcaattactacattcatcttaaaacatcagtatttcacccgtgttacagcgtaattaaaacacagtaacgattcaaaaactgaacattacagtgattatttaacggttttgagcgtttcctcaagctcttccacataatgctgaacactttgagccgcaatacttccgtcgcctgtcgccgttacgatctggcggagcgttttttcacggatgtctcccgcggcgaaaatgcctggaacttttgtttccatttgagcgtttgtttcaatgtagccttcttcatttgtgatgcccaagttctcgaacggtttagaaagcggaagcataccgatataaataaagacgccgtcagctttgaattcttcttcttctcccgtcacggtatccacaagagtaagtctgccgacttttccgttttcctcatggatttcttttacggttttgttccatttgaagtcaattttctcattgtcaaaggcacgcgcctgaagaatgctttgcgcacgcaatttgtcacgtctgtgaacgatggtgacttttgaagcgaagcgtgtcagatagacgccttcttcaacggcggagtctccgccgccgacaacgacaagctctttatttttaaagaacgcgccgtcacaaaccgcgcagtacgatacgccgcggccgcccagttctttttcgccgggaacaccgatctttttgtattccgctccggcagaaatgacgatggcacgcgctttatattcttttgaaccggctttgaccgttttatattctttaccgtcaacgatttctttaatatcgccgtacgcatattccgcaccgaattttttcgcatgttcaaacattttattagaaagttcagggccgagaatgctttcaaaacccggatagttttcaacatcctccgtgttggccatctggccgcccggaattcctctttcgatcattaatgtggataagttcgctcgtgatgtgtaaacagcagcggtcatccccgccggacccgcgccgataatgatcacatcataaattttttcttctgacaccatgattcactccttttcgaaatggggcgcaccctatatgactaagaatccccatcaatcgtattccttacccatatcctattaaatctgaaggcaattcgctatttttttgctcatttttctaaaaaaccgtgattaggcagctcctgagcgggtatacaaataaagaaagagccttccgggatagaaggcccttgtcttattcattattgcacgacacgtcttacattgccgttgaatgctttcttccagtaagggttgctcatagaatcaatggatacaccgtgtgatgtattatcgttcaggaacgttccgttacctaagtagatgccgacgtggccgtttgttttatacgtgttgaagaatactaagtctccgcgtttcatgtcagacgcgcttactgctttacctcttccgattaatgtatctgtgtttgtgccgcttgcaggtccgagattaacgcctgcgttagcataagcccagcgtacgaatgaagagcagtcaaaaatacggttgtcaatatcggattgagtgcgtccgccgccgaacttgtacggggattgacccacaaggcttgatcctacgctgatggcgccttcaataccgcctgaatttgaaataacagatccgccgtcagaatcatctgaaccgccgctgttatgagatgatccgcctgaagtgctcttcggtttgcttgagctgtcagatgaatcagatgatgttgaaacagccgcttttttcacagttttaaccgccggtgccggctggctgtcatctttttggttttggtcttcagaagctttttgcgcttcttcctgttttttgatcagggcagccgctgcagcctgctcagctttaatgcgcttctgttctttttcagtgtcagctttttcgtttgcaagctttgatgcttcttttttcagatcagagatagcggaagccgcttttttctggccgtttttcgcttcgtcgaaaagcttgtctttctgatcaagctgtttgttcaggtctttttgcatagactcgagtttcgcaagatcatcttgaacttttttcagcttcacgttaagttcagcttctgcgtcttcgagtttcgctttatcctgctcctgctgtttgatcaggtctttatccgcgtcaacgatagaagataccgcagtcgcacgggaaatgaagtctccgaagcttgtcgcccctaaaagaacatctatgtatccttgagaaccgccgttttcctgtaaagaacgaacgcgttttttcaggatttcattgcgtttttcaatacgcgcttctgtttctttgatttcttttttcaaatcagcgatctgctttttcgttttttcgttttcagcttttttatcttcgattttattgcttgtatccaacgctttagcgttaatgtctttcagttctttttcaatcttagcctgcttgtcctgaagcttagacaattctctttcttttgcttcaaggcttgaagccacctcagattgcttgctttcaatttttgcttttttgctgtctaatgtttccgccgatgcagtttttgtaaacgggatcaaaaaactgcttgtcccgatgacggaagccaaaccaagtgttaataaactctttttcactttttctttcctcccttttactttaaacctgttctcatttggaattctattatgaacatcaaagttacgctccctcacatacccgtgaggctgatgatttttatgtataaatctttaaatcttttaaattggtatagattatacagcacatgtaaaataaactaatctcttatgtacgagactcattataccatcatgtttcgacaatttttattacagttatatttcaatgtgattgcaaatctcatattttgcaaaataaacggtgattacggcctgatttcgattcgaaaagcaaaaaaatacgtatgaatacctcttttttcggcggtaaagttctgttttgcccctttctgataaaaaaagaaccgactctttatatagaaagaatcggttttattctaaaatatcatctatttgtctgatgtatttcgaaagtgttgccggggttataccgtaaacggcggccgtttcttttttcgtcgttttttcgccgtttgcttctttccatacatatgcgatggctgcggcccatgcccgctcattctgtacggcagcggcggcccggatatgctgaatgacgtgaaaaacccagcagctcatgacgtcagtttttaaactgtcggcttccgctttctccagcagcttgaccgtccgatacgtgaacagcgcatcaccggagacgcctgaagcgcctttttcaccggaaagcagcagtttgacgaaatcttgttcaaacggtgaaacggcgcgttttgccgtcagaactttttcaagctggttccgctctccttcagcgctgctgatataataggcggcaagccgctgttcaagtgaagcaggcagcggttcctgccgctccgcccaaggcgcgggccggtctgattcgggaaattcggcttcggcctttttccaaatggtttccgcaaattctgtgcggcctgtcccgtaggctgaggcggccagccagtaataaaacgtttcgtcgccttcgaatccgcttttgtaaagagaacggagccatttataaccgagatcatgtctgccgacaagcgcaagcgtcgcccccagcttatagcgctgttcgaataaaatcggatacacattggcgagtcttccgctcaattctccgactttttcatcttccctctcgtaatagcagaatacaaggaggttgcacagggcatggagattgccttcatttttctcaagcacttcgaatactgtttgtttcgcttttgtgacattgcctgagtaaaagtaagcgagcgccaggttgttgtatgcagaccaaagctcggggtaatcggccgtaatctcttcaagcataacaaccgcttcatgaagctggccgctctcaagaagcgcttttgcccgatcctgcctgatcagcagctcatcctggtcatagagcgattcgttttcacccgcttcgccgaaatccaaaagctccatcagattttcaatctcttcgctgaattccccgtccggatcggcatctgaataagccgccgcttctttgtatgcttcctgaaagagccccaaatgcgcgaaattattcgctttaaaataatgacactcgggcatttcttctttcaggttcaccaaaataaagtcgaacagctcatttgactgctggtagtggcccatttcagaataaatgacggccagccgggacagcatttcggaatcattcggctcgaggtggacggcccgctgaatcagtttgctggcccgctttaaattccgctctttatatgcttttaagcctttatgaaaaaaatattgtccatcctgaagcagctggacaatttgcgcgtgctttttctgttcagaagtgtgttttcccacaaatatcctccgttttatacgtattaccgtcagtagtataccataaaacggtttcacctcaatagttcaaaagacaggatcggcttcgttttttactggctggttcgaccagattttagctgtttttttcacgaggctcggctggaagaatgacacggaaaagggttccttcgccgcgcttgctctcaacctctatcgaaccgccgtgcagctctgcgattttttgggcgatggacaggccgagcccgcttcctccttcgtttctcgccttgtccgctttataaaaccgttcaaatacacgctccgcctgttcaggctccattccgattccgtcgtcggcgatttcgacagccgccgctcccggcagatctgcaattttaacggaaatgcggccgccttcaccggtaaattttacggcattgtgaatcagattcatccatacttggctgagcagcgcttcatctccgtacacatacgactcctgtaaatcaatgagaaactcaatctgtttggcggaccattcaggctcacaggtcaatatggtgcgccgcagctgtttgtcaatgcggaacggttttttttgtatcggttcggtttggcgttcgagcgcagtgagcttcagcagattttcactgatttttgataatcgttctgtttctgtttcgatgatgtgtaagtagcgcccccgctcctcatatgataaatccggttttttcagaaggtgcgcgtagccctttaatgaagtgagcggggtttggatttcatgggaaacgttcgaaataaattcttgtttcagtttttccatttcactcagttccgcggcgagtgtcgacagttcatcagccaatttcgtcacgggatggttccgctcaatcttctccattttccgggaagcggccgctgtgaagttgccgctcgacatttgcttgatcgtggcggtcagcgaatcccagatcgcatgatgcctttcacgtgctgactttgaaaaaataaacatcgttacgaacagcaggccgaaaacaagccaaagcgtcagaatctgctcggcgtacggcacaagcaaaatcggccatatgagaccgaatccctgaacaatcaggtgagccgccagccataagaatgcggtgacagtgagaaggatgatgattttcccagccgttctgaagatccgtttcatcctgtcaccacaaaccgatacccgagcccccgcaccgtatggatggcaaacggatagtctttttccggaaaccgttctctcagccttttaatatgcacatcgacggtacgctcgtcaccttcataatcaaagccccaaatatcttctattagttgttctcttgaaaacgtcttattcggataaccggcgagcttaaataaaagctcaaattcacgccggggcaatgtcaatcccgctccgccgccgcgcgttacggtgcgggattgcttatctaatgtgaccgttccgatggtcagcagtttttcagcggtgatccggtaccgtttcagcaatgctttgacccttgcttccagctcaagcggctcaaacggtttgacgagataatcatccgctccggaagtaaaaccttgcactttgtccagcgtttcgccttttgccgtcagcatcaaaatcggaatgtccgtaaagctgcggacggcttcactgacttcaaacccgtccattttcggcatcatcacatccagtatgatgagatctataggtgctgattcgatcagccgcaccgccgcttccccgtcttccgcttctgcgacgtcaaaaccgctctgctccatcataaggcggacaagctcacggatatggcggtcatcatccgcaaccaatatgacagccatgaaaatccctccttctgcttttttcttttcatgaatcgacatgatgtctataaaccgaattttttcattgtctcctgtaccggcatacacgcttatggcttggctcttcatcgttaccgaccgtacacccgtaagaacaggactccggctgcaaaataaaaagcagctttttcagctgctttttattcataaagtcttgctttacacagctttgttttctaagtcggcattcagcttcagctgctgctccgcaaaatcgcggtacagcgaatgggatgccattaattcatggtgtgtgccccgtccggtgatttcaccctgttcgacaaagagaagctgatctgcatccacaaccgtggataaacggtgggcgatcacaatcgtggtgcggcctttcattaagacttcgagcgcctgctgcacccatttttcagattggctgtccagacttgatgtcgcttcatcaagcatcagaatgctcgggttgcgaaggagcgctctggcaatggcgatgcgctggcgctgtccgcctgacagcataattccccgctcaccgacctctgtttcaaatttcttcggtaagtcttcaataaattgcagggcgtaggccatgtcagccgcttgcctcagttcctcatcagtcacctcgcgttttaatccgtagcagatattctcgcggatggtgcctgacattaacgggctttcttgcgacacgtagccgatatgctcccgccatgactcaagggaatacgcatcaatcggttcatttccgagcaggatgctgcccgcagtcggattgtagaatcgttcaagcagcttaaataacgttgtttttccgccgccgctcggtccgacgatcgcggtgactttgccggcctcaatcgtagccgtaatgtcttttaagatggtttgatctgttttgtagccgaatgagacttgttcaagcctaatcggctgatccgcgttttcaatggcttttccggtttggatatcttcttctttttctgcaagaatatgaatcatccgttccgttgcgccgacggatttttgaagctgtgtgaaaaatgaagtgatctggcccatcggcataatgatctgaaacaaatacaggataaaggcaacgagtgcgccggctgtcagttcaccggatgacacctgcatcccgccgtacccgatgacagcgaccagcgccgccattaatacaagtgtaataagcgggcctacgagcgactgcaccttcgcttcacgcagcccgagtttaaagagcgccatgatgcctgcttttccgcgtccgtattccgcttcttcagcgtttgacgcttttacaagcctgatttccgggaggatgtggtttaataatccggtgaatctcgccgtttcatcctgtgtttcccgagaaattttaaacattttccggccgatcggcactaaaatcaccgcagccagcggcacgacgatcagcacgagcaatgtgagcttccagttcatgaaaaataagatcgtcagtgacccgataacggaaatgattccggtaataaatccgctgatattgtttgtgatcagctcttttaccaccattgtgtcattggtgacacggctgatcgtttctcccgtggcgtttttgtcaaaataagagacgggcagtttaattaatttctgccacaacaaatcacgcagtcccgagatgattttctggccgctgtagttcagggcgtaggtggcgtaggcgcttaatgcggcctgtacgataaacacggctgcgatgattccgatttgcacgcctgacagcgacgacatggaaaagccgtcaacgagctgctttgtcaacagcggaatcagcaggctgacgagcgttgtcacaatactgagagacagcgcgaaggccagcataccgtatgatggttttgtttttttgactaatgaaaagaatgagctgaatttccctttaggttttggttgtttattcggcatatgttttcctcctatatcactgtttatactataacggatgtgcatgaacggaatatgaacaaaacgtatatttttgataaaaaccaaaataaactctattagtcaatattatcaaattcatctgcctccggttgcggaaataaggaatatttaattgaatgtttaagtttgacagattaaaaacctcacggatctctccgtgaggtttgttttactcagatgctgaatggcgtttcgcaaggacgtcaagcacgtcgtccaaaggaagcgactgctcacgcagaagaacgagcaaatgatacagcaaatccgccgcttcccattttaattcttcttggtcgcggtttttcgcggcgataataacctctgcggcttcttcgccgacttttttgaggattttatcgacgccttcccgaaacagatacgttgtgtaggctccgtcaggcatctccgcctgccgtttggcgattacgctttccagttcatttaagatgccgaaacgatcctgcgcatccgctttttccggagaaaagcagctgtagcttcccttatggcatgcgggtcctgagggctccgcaagcacgatgagggcatcttgatcgcaatcatagcggatggctttcaccttttgggtattccccgatgtcgctcctttatgccacagctccccgcgtgaacggctgtaaaaccaggtttctttcgtttctatcgttttttcgtaggattcacgattcatataagccagtgtcagtacttctttgcttgccgcatcctgcacgatggcgggaatcagtccggcctcgtcaaaccgcagttcatctgcccgtttcatctcacattcaccccgtgtttcttcatataatctttcacttcttttatagatgtctctttgtaatggaaaatggaagctgcaagcgcggcgtccgcttcaccgatcgtgaaggcttcaagcatatggcgcgcgcttccggctccccctgacgcaatgacgggcaccgggacggcacgtgtgacaagctgtgtgagcgtatgattaaagcctgttttctcaccgtctgcgtccatgcttgtcagcaggatttcacccgctccccggctgacggcttcttttgcccaggccgtgacttcccactcggttttctgtctgccgccgtgtgtgtacactttatagcaattcgaatcttcgtcatactttgcgtcaatcgccgctacgatgcattgcgagccgaaaaaatccgctccttccgtaatcagctcggggcggagaacggccgctgtattaacggatactttatcagcgccggcgcgaagcattcgtttcatatcgcttaattgattaattccgccgccgaccgtaaacggaatcgccagttttgccgcaacctgttctacgacgtctgtcatcgtcttgcggccttcgtgagaggcggaaatgtcgagaaaaacaagttcgtcagcgccctccctgtcgtaagcttcggccagctcgacaggatcgcccgcatctttcagcccgagaaattgaatgcctttgacgacgcggccttctttcacatcgagacacggaatgattcgtttcgtgatcatgcgtccttcaccccgctgagcgcttcagccaatgtaaattgttttgtatacagcgcttttccgataatcgctcccgatacgccggcgtctttgaagcgggccagtgctttgaggtcggcgactgagctgactccgcctgaagcgatgacggtttttcccgttgcttttgcgagctgaacggtgctttcgatgttcggtcctgacagcatgccgtcagttgcaatatccgtgaaaatgaaggtttccgctccttcggccgccaattcacggcccagatcggccgctcttaccgaggatgtttccagccagccttccgtcgagacatatccgttccttgcatcaagaccgatcgcgattttgccgccgtattgtttcagcatgctcttcacaaatgccggatcggaaacggccgagctgccgagaataacgcgatcaacaccttgtgataaataaccgtacacatccgcttcagaacggatcccgccgccgatctcgactttggcatcaagctgccgcgcaatgtcaagaacatgcctgtcgtttactttcctgcctgctttcgcgccgtcaaggtccacgagatgaatccattcggcaccttcgtttgcaaattgcgccgccatgtctaaaggagagtcaccgtatatcgtttccttgccgtaatcgccttggatgaggcggacgcatttgccgtttctcatatcgattgccggatataatgtaaaagcgttcatttcttcaccttctgttccgctgccatttttgtaaattgcgttaagatcgccattccggccgtaccgcttttttccgggtggaactgtgcaccgaagacattgcgtttcccgacgacggccggaacacgaacgccgtgctcagcgcttgccagaagatcgccgtcttccatcccgtctatataataggaatggacaaagtaaacgaagccttcttccgcttccgaaagcaaaggagacgtttggtgaaacgtcagccggttccagcccatatgcggcaccttcagcttgtttccttcggcatctctgtctttgagtctcacagcttttccggctaataaaccgagtccttttgcagagccgttttcggtgctttcttcgaaaatgagctgcatgccgaggcagatgccgaggagcagcttaccctcgtcaaccatacggtgtatgaattgatcaagctttgcgctgcgtaaattgtccatggcgtcactgaatgatccgacaccggggagaataaaagcatccgctttttcaagctcttccggccggtctgatacgacatacgggacaccgacgcgttccagcgccttcgacacgctgaataaattgcccataccgtaatcaattacaccgatcatttacagcattcctttcgtagacggcacacccttgacgcgcggatcaatggatgacgcttcatcaagcgctctgccaagcgccttaaacacggcttctatcatatgatgcgtattcgtgccgtaatgaacgatgacgtgcagattcattctcgcttccagcgccagtttccataggaattcatgtaccagctcggtatcaaacgttccgactttcgcttgcggaaatgcaccgcgcatctcaaggtgcggccggttgctcaggtctacggcgacttgggcgagcgcttcgtccatcggtactagcgctgatccgtaccgtttgatcccttttttatcaccgagcgcctccaaaaaagcctgccctaagcagatgccgatgtcttcagtcgtgtggtgatcatctatctccgtatcgccttttgcgtcaacagttaaattgaattgcccgtgctttgtgaacaaatcaagcatatgagtcataaacggcacatccgtgctgatgtcggcttttccttctccgtctatttcgaaagccagcttaatatcggtctcatttgttgttctggcgcgttccgcttttctcatcggtcattcctccgtttctcgcttcaatcgatcttgcgtgcgcttcaagcccttccagtctcgcgaaggcggaaatgctgtccgcgtgcgtttcaaatgccttccggctgtatgagatgatgctcgatttcttttgaaaatctgttacattcaacgggcttgaaaaccgcgccgttccgtttgtcggcaaaacgtgattcgatccggcaaaataatcgccgaccggttcagcgctgtatcgccctaagaaaatcgcccccgcgtgtctgatgcttccaagcaaagcctccggcgaatgcgtcatgatttctaaatgctcgggcgccagcgcattcaccgtgtccactgcatcttccatcgattccgcgatataaatgcggccgtgatccttgatcgacgcttcggcgatttctttgcgcggcagggtctgaagctgtttatccacctcatctgatacggcttcggcaagcttccgtgagtcggtgacaagcacgcttgagctgagcgtatcgtgttcggcctgtgaaagcaggtcagcggcgacttctttgggcaccgccgtatcgtctgcaaggaccacgatttcactgggcccggcaatcatgtcaatatccacaacgccgaagacttcgcgcttcgcgagtgctacaaatatattgccgggacccgtgatcttatcaacaggctgtatcgtttcggttccgtaagcgagcgcggcaatcgcctgcgcgcctcccgctttgtaaatttcctttatgccgagctcagacgccgccgccagaacgcccggcgaaaggcggccgtcttttcccggaggactgacgagaacgatccgttccactcccgcagcgagagcggggatgacattcattaaaacggaagacggataagcggccgtcccgcccggcacgtatacgcccgcggaatcgagcgccgttattttctgcccgagcatcgagccgtctttgcgatggtaaaaccacgaggattgcagctggcgttcgtgatattctttaatattggcaatcgcctgtctgatcacttccagcagctgatcatcaagcagacggtacgcctcggtgacttcctctgcactcacggccatttggttcaggctgatgccgtcaaatgtttttgtataggccaaaacggctttgtcaccgttttgtctgacgtcttcaataatccccctgacggttttccgctgctcttcggttccgctgtcgatggaacgcttcagtgagaaccgctcgcttctttttactgcggttattttcattgtgccgtttctccttccacaaccctggccaacctggccgccatttcgtcgattacatcatccttcatacggtagctgaccggattgacgataaaacgcgatgtgatgtcacaaatatgttctgattcaacgagaccgttttcttttaatgtccgcccggttgatacgatatctacgattctgtcagcaagcccgattaaaggcgccaattcaatcgaaccgttcagcttaatgatttccacctgctcgccctgctctctgaaataacttgacgcaacattcggatatttcgtcgcaatcctcggggcgactccgttccaatccgctccgggaagccccgcaacggcgagatggcatttgctgattttcagatcgagcacctcatacacgtcacgctcttcctcaagcatgacatcctttccggcaataccggcatcagcgacgccatgctcgacataagtcgtgacatccatcggctttgccagaataaagcggagattttcttcaggaacgtcaatgatcagctttctcgattcttcaaactcctcgggcagcctgtacccggcctgccgcagcaacccggccgcttcttcgaatatccgtccttttggcattgccattgtgagtaccttacccattctgctcttcctttctggcaccgataaagtatgtgacgtttgcgaatgattttgtcatatgatcgatattttcaatgcccgccagatcctgcaggacgacttttctgcctctcgccctttcttcctccgcgaataaaatggcctgcgcccgttgctccttgctgaaaatcacggcatccgcttcactagtttcttcctggatgccgagcgcttcaatcagcctgtcgatacggagcccgaaacccgtggcgggagcgggactgccgaaatggccgagaagattgttatagcgtccgccgcttccgatgacaaaaccgacatttgccgcatacacttcgaataaaattcccgtgtaataactcatatggcttaccatattcagatcaaggcgaatatgctcggcacatccgtaatcctcaagaatgtcccacaggtcttccagctcctgaatcaagctttgtccggagatgccgatgatctcctccgctttggcgcatatctctttcccgcctcgcaattccagaagtgcgagcagccggcttttgtctattgaagaaagcggaagcgatttgacatgttccctgtatcccacgtaattcttctcaaagagaaagcgccgcagaacatccgcccgctcagcattgcccagaacctcgacaaacagctcatcagcgagtccggcatggccgatcgcgattttaaaccggtgcaatcccgcgtttttcaaagcgccggccgccagcgcaatcacctcggcgtccgcgcttgttgatccgtcgccgatcagctccgcgcctacctgttcgaattctgccggacgtccgccttcccgctcctgagcgcggtagacgcttgccgcgtaccccgctctgagcggatgattgtgtttgtgcagcttagacgccgccaccctggcaatcggtccggtcatatcaggccgaagcacaagcgttttcccgtcctgatcgagaagcttaaacagctgctgttcttcaatggctgactggacgcctactgtttcataaaattcaagggtcggcgtctccataaactgataaccccatttatcaattaaatccgtcagtgtggaacggacttttttcttggcttcgtataaaccgggcagcgtatctctcatgccatgcggtttctcaaacataaacatttgccttttacacctccgctttgtctgaaggaaaattccaaatcctttagttcgctaatatgataatatgttagcagataaaagaatgaattgcaacgcccaatgtccgcctattcttttccataaacatggctaaagaatgaacaaacctgtaaacatatcggaacgatcgaatcatattgagcagaagtgctataatacatagaatagcttcaacagaaacaagggagaagaattgataatgaagacgcttggaacattatgtgtgctgattctgacagccgtccttgtctatctgggatataacatctatacaaacgatattcatttgaattttttcaatcagcagtccgacgagcctgatgagaaaacaccgttaaaagggagcgcgtcaccgctgaatgtcgttctgtacagacagatggattctcccagactgtacaatggctgtgaggtgacaagccttgccatgattttgaacaatgccggatatcatgtgtcaaaaaatacattggcggataaaatcaataaagttccgctcacatacagcagcgggctgaagggagatccgaatgaaggatttgccggagatatggaaaacggcccgggtttaggcgtttatcatgagccgattgataaacttgccaaagaatatgcgggaaacaaagtatacgatctgacgggaaaagacatttcttcagtgtaccgccagcttgaaaaagggcggccggtctgggtgattaccaccacatcctttaagccggttgataatatgcagacttggaatacgccgaacggaaagatcgacgttacgttcagcatgcatagcgtagccgtcaccggttatgatcacgattatgtatacgtcaatgatccttacggctataaaaacagaaaaacagatcggtctgactttgaaaaagcctggaagcagatgggcagccaggccattgtgatcaagtcataaaaaaaccccgctgacgttaatcagcggggttttcccattcgttctttcatttcttcgtccgtatagatcacctgcatcggatttcctccgacaaacgccccggccgggacatctttgtgcaccagcgtgccggctgatacaacggctccgctcccgatggtgacgccgggcagaatcgttgtgtttgccccgatcattacctcgtcaccgattgtgacaaaaccggtccggtactcatgtattaaatattcatgagccaaaatcgtcgtattgtagccgatgatactgttttttccgacagtgattttttcgggaaacatgatatccggcatcaccatcagcgcgaatgacgtctgttttccgacattcattttcaaaaaggttcggtacagccagtttttcacgcttaaaaacggcgtataccttgcgatctgaatgatgatgaaatttttcatcaccttcagaaagggaaccgtctgataaacatgccacaatgaatttgcacctgaaaccggatggcggtctgtttttctcacggattacttcactccggtgatgtgcaataaatcactcattttctcgagcatataatcgggttcataggcggaaagcgtctgtgcgcctttaatcgtccacgcgacgccggctgttttcgtgccggcgttttttcccgccatgacatcgtgataattgtcaccgaccattatggcttccgacggatcgcacccaagccggctgagagcaagccgcacaggctcggggtcaggcttcggatgctttacatcatcaagcgtgacgacagtatcgaaaaacgccccgatgcctgtcagcttcaatcccatattgactgtatccctcagcttcgtggtgacaatcccgagctgatatcccgcttttttcaattcatccagcgtttcataaaccgtttcgtactccgtgacgagctcatcgtgcttttcatggttgaatgctctgtacatgctgatcatctcatcgcacttttcagcattaatgcctgaaaacgtttcatacagaggcgggccgataaacggaagcacatcttcccttttgaactgccccgggcaataatgatcaagcgtatgaagataagaagcgataatcagttcattcgtgtcaatcagcgtgccgtcgagatcaaataaaatggcggttacacgtttatcagtcatcttatgtcctttccgatttcaggcgtcagtccgtgtcggcataccgcttatcggcataccccttcatgcgtctgaaaatcattaaaataatcgcaagtacaatcagcacaatggaaatgacctgcgcgatccgaagctggctcgtaagcatcaggctgtccgtccgcattccctcaataaagtatctgccgatcgaataccagatcacatacgtcaaaaatagattgcccctgcgcaggttcacgcggcggagcagaagcagaatcacgacgcccgcaaaactccacagcgattcatacaaaaacgtcgggtgataatattgtccgtctatgtacatctgattaatgatgaaatccggaagatgcagactttccaaaaatgaccggctgaccgcttcaccgtgagcctcttggttgataaagtttccccagcgcccgatggcctggccgagcagaatactcggcgcggcaatatccgccagcttccagaatgagatgcctcttacttttgaaaagacgattcccgtcgcgatcgcgccgattaatccgccgtgaatcgcgatgccgcctttccaaattttaatgatttccccggggtgttccgagtaatagctccactcgaaaagcacataatatgcccttgcgcaaatgattgcgatcgggatggcgaaaagaacaagatcaataaaaatgtcctttttcagcccccgcttttcactctccctcatggccatccaaagccctaataacgcgcccgcgccgataatgattccgtaccagtgcacggataatggcccgagctgaaaggcaatcggattgattggtgttcctgcttcgttcatatcattgccaactcctattcgtcttgttcgccgtcctcaatgacatccgccagcttattcgtaaattgctcggcagcatttaagcccatccgcttcaatctgaagttcatcgccgcaacttcgataataacggcgagattccgccccgggcggacaggaatggtcagttttgtaatttccgtatcaatgattttcattttttcttcttcaagtccgagacggtcgtattgtttcccttgctcccaaagctcaaggtccatgacgattgtaattcttttattgcttctgacggcgcccgctccgaacagcgtcatgacatttataatgccgagccccctgatttcgagcagatgctcaatcagatcaggcgcgttcccgacaagggtatcctgatcctcctgccggatttcaacgcagtcatccgcgacaagacgatggcctcgtttgacaagctccagcgccgtttcacttttaccgacgccgctttttcccgtaatgagcacgccgacgccgtatatatccacaagcacgccgtgaatggccgttgtcggcgcgagacggctctcaagaaaattcgtcagcctgcttgacagcctggttgttttcagaggggatctgagcacaggcacgccgttttgctcggaagcttctacaagctccggcgggatcggcatatctctggaaagtatgatagccggcgtcacatcggtgcacagcgatttcatccgctgtttcttatcttcctcgggaagctgatcgaaaaatgacagctccgtttttcctaaaagctgcacccgttctctcgggtaatatgtaaaataaccggcgatttcaataccgggccgtgataaatcactcatcgtaatcgggcggttaatcccttcttctccgctgatcaattctaaatggaactgctccattacgtctttggtccgaacctttgccaagatatgttcctcctgttctgggatgttccgagctttgaacagttatattttatcactttaccgtctgaaccaaaacagatttatacaattccggcataactggtctagataactagtctgaaaaagagtaaaataaaactaacaactaaccagaaaggcgtgttttaaagtggctgaaagcttgttaatcagcggtgcggacatcgtaacagaagaagaaatcatccgaaacggatttcttggtataaagaacggcatcatttcttacgcggggaaaacaagaccgcaagaaacgtatgagaaggaatggaaggcgcccgagggttcatatgcgcttcccggaatgattgatattcatattcacggcggatacggcgcggatacgatggatgctgatgttgcagctcttgatacaatgtccgcccggctgcccgaagaaggaacaacctcttttctagcgacaacgatcacacaacggcacgaaaacattgaaaaagcgctcgtcaacgccaaagaatggacgtcttcctcaccgcaggcccaaaaaggcgctgagttgatcggcattcatttagaaggaccgtttgtctctccgaaaaaggcgggagcacagccgaaacaatggattactcctgctgatgccgggctctttcagaaatgggagcggctctcgggagggctgatcaaaatcgtgacgcttgcgccggaagaagatcctgatttcagcctgatccgttatttaaaagaccaaaacatcatcccttcaatgggacacacagacgcgggagccgagcttttacaaaaagcggcggatgccggggcggtgcatatgacgcacctcttcaacgccatgagctcctttcatcatcgtgagccggggggcatcggtacggctctcgcctgcggccgcatcacggcggagctgatcaccgacggcattcattcccatcctttggctgtaaagcttgcctatttggcgaaaggaagcaaaaacctgatcatgattacagactccatgcgggcaaaagggcttaaggacggagaatacgaattcggcggacaaaaagtcaccgttcgcggggacacggcgcttctctctgacgggacgctggccggttccattttaaaaatgaatgaaggcgcggcgctcatgcgcaggtttacaaactgctcatggctggatatagcaaatatgacatcggcaaatgcggcccgccgcctcggaatattcgaccgtaaaggaagcatcgccgaaggaaaagacgccgacgttgttctgacggacggacagtgcggcgtgctggccacgatttgccgcggaaacaccgcatatatctcaagggaggctgattggacatgaacgttatcacatgcagacattatgaagaattaagtgaaaaagccgcatcgattatcgctgaaacagtgaaacaaaagccggatgccgttctcggccttgcgacgggaggcactcctgaaggcgtatataaagaacttgtgcggatgcaccgctcagaaggcttgtcattccgaaatgtcacgacgatcaaccttgatgaatacgccgggctttctcctgaggacaaaaacagctatcattattatatgaatacacatttttttgcacatatcgacagccgaaaggaccgccactttctccctgacggacgggcagacgatcttgatgccgaatgcggacgatatgaccgattgattcaaacactcggcggagcggatatacagcttttaggcatcggacacaacggccatatcggctttaatgaacccgggacgccatttgaatcccgaacccatgtcgttgagctgaatgaagagacaagacaggcgaatgcgcggtactttccgtcaattgatcaagtccctgtaaaagccctgacaatggggatcgggacgattttgtccggcaaacggattttgatcatggcatccggaaaaagcaaggcccaagcggtgaagcagcttctggacgggcgcatcagcgaagcattccccgcctccgccctgcacgcgcatccggatgtgacggtcttgattgatgaaaaggctgcgggcggcgattgaaaggatttgacctatgcagattgataaacaatctccgattccgatttactttcagattatggaacaattaaaaacacaaatcaaaaacggcgagctgaaagcggatgcgctgcttccgtcggagcgggaatacgccgaacaattcggcatcagccgaatgacggtccgccaggcgctttccaatctggtgaatgaaggatttttatacaggcagaaaggccggggaacgttcgtcagcaaactgaagatggaacagccgcttcaagggctgacaagctttacggaagatatgagaagccggggcatgaagccggggagcagacttgccgaataccagctgattcaggcgacggaagaattatcttctatcctgggatgcggctatccggcaacgcttcataaaatcatccgcgtccggctggcaaatgatatcccgatggcgattgaggcctcgtacatcccgtttgacaaggcgggaaaactggacgcctcccattttcaatcatccatgtatgagcatattgaagcgtacaatcagatgccgatctcacgggcaaaacaagagcttgaaccgggagccgcttccgaggaagaagctgagctgctcggtatccagcccggcgcccccgtcctctatatcaagcggaccacttatctgcaggacggcactgcctttgagcacgtcaaatccgcctacagaggcgaccgctacacattcgtgcactatatggacagggtgaaatgaaacatctccaaccgttacgggttggagatgtttttttgatctgccattttcaaatcaagccggggaatattctctatgactctgtcaaaacggagaggctggggttctggtatctatttttataaagaaaagagtaataaaatgctaccctctgttttggacaatatacggaacctgctttgaaatcagcagcagcggttctttgtttttatgagccagtgaaaacatgattgcgccttcaatcatcgagttgattgtcaccccgagcttctccgcttcctcttgttcaaacccatgctcaagaaattttgccgcaaacacatccgtccacttcttgaacacctcaacacatgtgcatcttaacgtttcattgatcagagcggtctcacccgccagcaatccaaccggcacgccctcaatattctgcggatcattaaactgttcagccgttacatgaataaagtgctgaatcgcttctacagggtccgcgaattgagacatactattctgtatttgcttttcaacgcatcttcccgtatatttgatcgccgcaatggcgagttctgcttttccgtttggaaagtgatgatacacagaccccctgggtgctccgctctcttttataatttgattcaaaccagtcgcatggtatccctgaatctgaaaaagatatgcagaggtttgaataattctttcttttgtcccggttttactgttcattatgtttcctcctgcatattacgaaaaccaatcgattttagtatagaaaagggacataaaaaagtcaaaagcacttatcacagcagggcgccgccatttacgcacagaaaaaatcctgctgaccgtcagattttcttctgagcgatcagcaggctgtatgttttcgttatgggtttgaggcatgcctgaaatcaaactgatccggagccgggcgatacggcgtatttcccgttctgaacatccacagcggtgatattgttttgccgttgtaagggtccttaacaacggtgtaccagtaataaacggaatcaggctgcaggccgtcccagacccaatttgcggtttttccgctttttacgtgttttttatgaccgagcagttcgttcgtatagacgttgcattcaaaataatcggtcgctacccttttcctcttcggctgtaaatccatttctgctgagaattcgtctttatcagcgaacagatcggtgtcatagtaattgatgtcatccgtgtacggcgagtaggagaacatgtgaacctgattggcggcctgatcgaattgcatcatgcgcataaagccctgccccccttccggaccgtcctggtagtcggtcagaatctggtggacgaggcggtccggttttccgtccctgtcatcgtcaagcgcatcggtttttttcatggcgttatggtaatggccgcttaataccatcgccacattgcgattcggcttgacgacttttcgatagatcgtctccccgatcgggcttcgatttccgctcacaagcaagtactcatgaaagcataagatggcggttcggtccggatacctcttcagcacttgattgatccagtcaatctcttgttccgcaatgccccagcccatataaatcataataaaatcgttcccgcttgccgacagcagatcataatgcccgcggttatttttgtatgatccgccgtaatgcatgttctgttcaaaccggcggctcccgaagaaatccccgaatgttcggtatgtgccgtctttatggccgacgtcgtgattgcctgcaagcactccgtacggaattcccgccttgtcaagcgtccgcatggagtgatcggcgtttttccactgtttcatcaccattgaatcatcgacgatatcaccggtatgaaagacatatttaatattgtgcttttccttattttctttgatccactccgtcattttgtcaaaaatgtgcgggtgcccttgtgcgtaatactgtgtatccgacatccagacaaacgtgtaattgcctttcgccggtatttgatcctgcacgatgacattcatttttgagttcttcaccacatccactgcggaaacggctgcttttaatgtaaacggctttttatctttggcaagaacgctgtccgcctcctgccagcggcttgtccggtaattccaaatatacatggttacctttcggccgggcagagagcttcctttccagaccgcctcggccagatccgtttcgtcgatagacgggtcaacggagacttcgaaccggtgataaggaaaacgctccatactttccgccgaaacggtttttccgtcatttgccgagatgcggttcatttccggcagggtaaacggcatttcattttcttttatgcccctcggcggttccgttaatgaggcgtgtttatacactttcacgctgcccggattccgcgcggtataacggaagccgcgataaaatgatacattcatgtcatccttcgtcgggtcttttacccggacggacagctttgctttgtgggcgccgattttttgatcggcaagctccggctggttcggctcctcccgtttgatatggaaggtgcggacggaccttgtttcatttccggcaaggtctgccgcaataatggtaagggtatgttttccgggcttgagatcggctgatgacgtgtgatgcgggagcgtaatgctttctccgtccaaaaacgctttgacctcttccactttgctccatttgtcacggatgtccgcattcagctcaacattacctttcagcgccgcgccttctttgatacccgggacaatcttcggccccgtattgtccacccgcacagattggctcagctgctcctcaccgtcgctaacaaaaatatggtgatagccttcagaaagcttcgccgtgttccacggcagcagccgtgacgtaaacaaatgatccggcaggctgaatgagaaggtcttctgctgattcgcccgcctgccgtcaccgataaacagctgctcagccggatccgtcttcccgtctttgatcaccgttccgtccgaaagcaccagacgggcatgtttcacgacaaaatcatcccgattctctcctgtgtcatacggagaaacctttgagcccgaacggatggatactttctgcgttttgccccctttttgcagcagacgttccggaaggagaaccgagtgcgttctgtagcggtgagacggatcgtcaaaaatgtgcagcacctcattttccattatgacggtgttttgaaaataaagattcgttttccgggcatcgaaggcgaaatagacctctttttccagcgccggccgggtctcctgccgcttgccgtcaatccacagcttgatcttatcggcgctgacgtcggaagtcgctttgagcagataggtgccggatatcgtatcttcgggttcaacattcattctgagtccgtgtgatttgctcgtctgttcaatgtcaatcatcttgacgggcgtttttgcttcattttctccatcactggctgcgatataatactcaagctgatcctggccgagcagttccggggaataaagaatgtgatggtataagctgtcgttgcggtctttttcggccagaattcgtttgaatggttttttctcattggtccggtaataaaacgcggctgttttgacaaggtttttgtcttttatgtcagcctttaattcaatgctttcagcgggccggacgggctttctgtctgtaaggtcttcgatgaccggtttttccttgtcgggttttatcacccttttctgctgcgggatctgcgcctgaaaaacagagcccggtgacggcttatgctcgctcgtggagatcttcagcaattctcccgttccgttcagcggatatttgtacagcaaagaagtcagccggcggaaagcgtgcttccggtaatgcgctgaggcgataccctttccggtatttgccgacagcaccaccgtacgcgggcggccgttggacattccgtccgtcccttcgatgacggcgagatgttttccctccttcaggcgtgtcccgtaatagcggttgaaatcatctatcgtcagttctgatgcggcgcgcctcagccaaaacacgtaagtcccgcctgacggaatgacggtatcttctttcggcctccatatcatgtctgattccggcccttccttcggatagcggtagcggatgtgatagtctttaaaatgaatgggcctgtccgtcgtgttatacacctcgataaattcataggcatcagcgccgtcttcatttttcgtatcaaccgcaagctccgtaatcatcagctcgggaatatgattcaaatcggcttgatagccgtccagcttcagccgctttttctccgattccgcccgctgtctgccgttggtgaaaacgaggtaatattccaattctccattccagatatcccgttttgaaacctgggccgtaaacagccggattgcgcctggcgcgggctccatcggcaccattttaaaccccagctcattgctttgtttataaaaaagaaacgccgaaaacgcttgatagtcagcattccgtacatgagcctgtatgaacaggtttcttttcatttccgcctttacttcgatttggggaggattctccagaagcggtatgtaatgaggcggctgtccgaattcctgctgattcacggggattgccgattctttgcgcgccgcatccgcagaaggactcacacaaagcaaaccaatcagaaaaaagagcgtcatcacaagtttcatctcattacctccctatacattatgttgcgtcaggaggctgccgcttatgtaaatcacacataaaaaagctgccctctcgggacagctcgttttttacctttttctaagcggctccaatatgcctttttggatcagcaagtggaaaacggacagcacgacggatgcccaaatggcggtgccgaacccatcaatctgaaagctgtctcccatcaaggctgcggtcatcattaacgtaatggcgttgatgacaaacagaaagaggccgagggtcacaaccgtgacgggcaatgtcaatatgacgatgatcggcttgatcagtacatttaacacagaaagaatcacactggcgatgacagccgctccgatactgctgatatggacggaatcaaaatatcccgcgataacgattaataataaagcatttactaaaatgctgactgcccatttgatcatttatttcaaatctccttctaaaggtacaacaaaacaccagataatatatacaataggcacgattccgctcgtgacaagcgctaatacaacggtgataatgcgtaaaagcgacgcatccatattgacgtactccgccaaaccgccgacgacgccggcgattttacggtttttttctgaacgataaagtcttttcatccaatcacctctgagtatgcttgagcttgatggctcctgttaacgattctgagaaaatcgagagatgctgatcatggccttgatttgatgccagcatcagttctttttgaatggtatcattcttttcctttaaaatttccgcatcaatcagctcatggctgagagagccgagattgcttttcagctccgctttcaccgccgaatcatcaggcagagcgatatccacgtttccggtcgtcgttttcgtgtagatggagcggcagtgcggcgctgtcacggtaagcatgatattgccgttaaagctttgaacgtcaatggattcactcgatccgcgcaaatcaatcaagccgttgatcgtttccgcttcaatcgcgccgcattgatgtccggccagcttgatttgtccgttagccgtttccgccgacgctttatcagccgtcaaatgagagaatgacagaacgccgtttgtcgttttcgccgagaattcttttacatgtaaatgttcccctctgatcggtccgttaaacagcttcactcttatcttatcgtactctttctggggaacataaagcgtgacattggttttcatcgttttcttttccgtgcggacaaaaaacttattgcccttcacttcacactcaatgtgctgaagaaatgcggtgcgcgccgcctcctgactgtccgcccggtacactttcgcctggcactccgctctgatatcttcatccgcccacggcacgatattgacgctgccgtttgcgatctgcatatcaatggccgagaattcactgtctttaaattgaaaaatatgctgcacttcgtgtgcgtggccgaaattcagatcaagatccgcttccttcacttttttgactgcagaatcaatccagtcgaacagcttcgccccgagcgacggcttttggcttccttttgccccgctttcgaaatcttccgcaggttcctggacctccgcagataatgcggtgatctgctcttctttttctttatattcatgatccagtttttcaatgagcgtcagtgcttcctgcgccgtcagcatgccgtcttccacaagctttaaaatccgttctttctcctgtttcatacaaaactcctcccccgacttttcttacacctggcgtaacaccttaatcccctgcacgatattccaaatgaccattccgatgaggatcagaaaataaacagctgctcctgttatcataacaaaaacgggcaccatactctccccctgagccgtaatcaatccgccgacaacacccgcggtcacaatcagcaatcccgcaaacggaatgatatgggaaatcagagcgcgcatggcatgccgcttcgtctctttttcatcgacgacaaagtaagccacaatcggaagaatgagcggcgcgagaaacacgctgaaataacagattgatgcgataatcgcttgatttcggttcaataaaaacactccctgtgccttgatgtaaaaacccttccttatacatacgtatgacgaatgggcgggtttcattttcatgctaaggacatgcttcgttatacgtaatttttgatttcagagatttcactatagaatcttttccccgaaccgattacaatatgtaacaaagcctgaccgtatgcaaggaggacatacaaatggagaaagatcccgaaaacgcccaagtaatggaagagagtctgcgaaatttaattcgcgaacagaaaagaatgaacagcgaaatgctggctgaattggaacagatcaaagcagcccctcttcccatttcccatgatatccaatatataaaagtgctgctggacagcagcagcacccatattctgcaggacttaatgcatttaagcaaacagcttccccaacagaaaaaagcctgtaacacaacagcccaaaaccggtgagttttgggctgtttttattgatctattatgtggctgccgtttctttttcagccagcaatgttttcatccgttttttatcacgttccattaccggtttcagatagcggcccgtatatgattctttcacttcgacaacttcttcaggcgtcccggaggctacgatcgtgccgccgcccgctccgccttcaggtcccaggtctacgatgtagtccgccgttttaatgatgtcgagattgtgttcaatgaccaaaacggtatcaccgttatcgacgagtctttgaagcacaaccaatagccttgcgatatcatcaacgtggaggcctgtcgtcggttcgtccagaatatacagcgtccggcctgtggaacgcttatgcaattcggaagcaagcttgacgcgctgcgcttctccgcctgacagcgtcgttgccggctgaccgagcgtcacatacccgagtccgacatcggcaagcgtttgaagcttgcgtttgattttcgggatattttcaaagaaagacagagcatcttccaccgtcatatccagaacgtcagaaatgctttttcctttgtatgtgacctccagcgtctcccggttgtaacgtttgccgtggcacacttcacacggaacgtacacgtcaggaaggaagtgcatctcaattttgatgatgccgtcgccgcggcaggcctcacagcgcccgccttttacattaaaactgaaccggccttttttatagccgcgcacctttgcttcatttgtctgcgcgaatacatcgcggatatcatcaaacacgcccgtataagttgccggatttgatctcggtgtccggccgatcggcgcctggtcgatgtcgatcaccttatcaaggtggtcaaggcctttgatttctttatggcttcccggtttcgctttggctttatgaagcttttgcgcaagcgccttatgcagaatttcattcacaagcgtgctttttccggaaccggacacacctgtcaccgccgtaaaagtgccgagcgggaatttggcgttcgcttttttcaggttgttttctgaagcgcctttgatttcaatgaaccggccgtcaggctttcttctctccggaggcatcgggatgaattgagcccctgacaaatagcgtccggtcagagagtccgcatcattcatcacttcttcaggcgtccccgccgatatgacgcggccgccgtgaatgccggcgcccggaccgatatctatcaaataatcggcagccatcatcgtatcctcatcatgctccacgacaatcagtgtgttgccgagatccctcatgtttttcagcgcgctgatcagacggtcattgtcacgctggtgaaggccgatggacggctcatcaagaatatacaggacgcctgacaaacgggagccgatctgcgtcgcaagcctgatgcgctgggcttctccgcctgacagcgttcccgccgcccggctcagcgtcaggtaatcaagaccgactttatctaagaagctgagccgttccacaatctctcttaaaattaaatcggcaatctgcatatctttctcagacagcgtcaggtttttgaaaaattccagcgcatcgccgacggaaagctccgtaatggtcccgatatgacgcccgttgaccagaacggcaagcgcttctttcttcagccggtagcctttgcacgtcgggcacgatttctgtgacatgtactgctccatctgttcacggatataatcggagcttgtctctttataccgtctctcaatattacgcagcacaccttcaaattcaatttcattttcgcgcacttgtccgaaatcattctcgtatttaaagtaaatccgttcattgccgctgccgtacagcactttatcaagctgatgcttcggcaggtctttgaccggagtctccatatcaatgccgtaatggcggcagaccgcctgaagcagctgcggataatattgtgaactgatcggcgtccacggcgcgatggcgtgttcctttaatgacagctcgggattggggatgacgagctcagggtccacttccagcttcaaaccgagaccgtcgcaagtcggacaggcgccgaacgggctgttaaacgaaaacagccggggttcaagctctccgatagaaaaaccgcacagcggacaggcgtgatgctcgctgaacatcagctcctcctgaccgatgacatctatcatgacacggccttcccctaagcggagcgcggtttccagcgagtcggaaagccgggcggcaaccccttccttgacaacgatccggtcaatgacgacttcaatggaatgctttttgtttttttcaagttcaatatcgtcggaaagctcggccatttctccgtcaatccgcacccttacgtaaccttgctttctgatttggtcaagcactttgacatgggcgccttttctgcctgagatgatcggcgcaagcacttgaagcttcgtccgctcaggatattcaagaatccggtcaaccatctgttcaatcgtttgcgacgtaatttcaatgccgtgctccgggcagtgcggtttcccgactctcgcgtacagcagccggagataatcataaatctccgttaccgttccgacggttgaccgcggattgcggcttgtcgttttctggtcaatgctgatcgccggagaaagcccttcgatcgcatcaacgtccggcttatccatctgccctaaaaattggcgcgcataggcagaaagcgattcaacataccgcctctgtccttccgcgtaaatggtgtcaaaggcaagggatgattttcccgatccggacagccccgtcacgacgacgagctgatcccgcggaatcgttacatcaatgttttttaaattgtgcgcccttgcgcctttcacctcgatccggtcaattgccatgtgttcatcatccttccgctttaagctctaacagtaaatcacgaagctctgccgcccgctcgaaatcaagcgctctggccgcttctttcatttcgtgctccatttgctcaacgactttctggcgttctttcttcgtcatcttcgccagtttaggcgcggcttttgttttatattcttctttatcctcagcggcctgcgtcgcgcggatcacatcgcggatttccttattgatcgtttgcggcgtaatgccgtgaatttcgttaaagcgttcctgctgttcccggcggcgcttcgtttcattaatcgcgatctccatcgaattcgtgattttatcggcatacatgatgacgcggccttccgcgtttcgtgccgcccgtccgatcgtctgaatcagcgaacgttcagaacggaggaagccttctttatccgcatcgagaatggcgacaagtgacacttccggaatatcaagcccttccctcagcaggttgatgccgattaacacatcatgttttccgaggcggaggtcacggatgatttcaatccgttcaagcgtcttaatctcggaatgcagataattgaccttgataccgatttccttgagataatcggtcagatcctctgacatttttttcgttaaagtcgtcacgagaacgcgttcattccgttcaatcctcgcctgtatctcgccgatcagatcgtcaatctgtccttcgatcggacggacgtcaatgaggggatcgaggagtcccgtcggtctgatgatctgctcgatcatttccggcgtatgctcaatttcatacggtcccggagtcgccgacacgtacacgatattgtgcatgtgtttctcaaattcctcgaatcggagcggacggttgtcaagcgctgacggcaggcggaacccgtgatcgacaagcacctgttttctcgcctggtcaccgttgaacatgccgcgcacctgcggaatcgtcacatgtgattcatcaacgacaatcataaaatcgtccggaaaataatcaagcagcgtatatggcgtagagcccggcggacggagtgtcaaatgtcttgaatagttctcgatccctgagcaaaaacccatttcccgcatcatttcaagatcatatctcgtccgctgctcaagccgctgcgcttcaaggagcttgccgttttcgtgcatcactttcaagcgctcctcaagctcctgttcaatattcagaatcgctttttccatcttttccgcccgggtgacgaagtgggaagccgggaaaatcgcgacatggtcacggtcgccgagaatttctcctgtcaaagcgtcgacctctctgatccgctcaatttcatctccgaaaaattccactctgatacaatgttcgtcacgggaagccgggaagatttccacaacgtctccgcgcacgcggaacgtcccgcgctgaaagtcgatatcattgcgggcatactggatatccacaagctttctcagcagctcgttccgctcaatttccatttccggtctgagcgacacaaccatctcccggtattcttcaggcgaaccgagaccgtatatgcatgacacactcgcgataataatgacatctctccgttcaaacagagaggatgtcgcggagtgtctcagtttatcaatttcatcattaatgcttgcgtctttctctataaaagtatccgtttgaggcacgtacgcctccggctgatagtaatcgtaatagctgacaaaatattcgacagcgttgttcgggaaaaactccttaaactcgctgtacagctgtccggcaagggttttgttatgggcaatgaccagtgtcggtttattcacttctttaatcagattggacacggtaaaggttttgcccgtccctgtcgcacccaggagagtctggtgttttctgccttcctgtattcctttgacaagcttctcaatcgcttgcggctgatctccctggggctgatatttcgagactaactcaaaacgatctttcacaaaaaagcctccgtttctttacgaaatcttcctattgatatagtaacacaatgacgggcaaaatcactaaaaatacgaactaaagttcgatggtttatttttaccaagtcaatttttgtataaaaaacctgcttttatggcgtaaaagcaggcattctatttcatattcaccatgtcaggcattgtctttctttttgtctgcttcttttttggccatgtacagccctccggccaccagcgatacgacatccaatccaacgataaaatacgtttcggtgtaaccctttaaataggatgcgaaaagcagtgcggctgtgagagcgatcgccacatagtggttaaacgtgacgcgcgtaaaaaggacgaccagcataaaagggaaacataatgcaaaaacggcttttgtaatcacaaaaaccctcctcgggaattcttcatctcatctgattatagtaaaaaatgaagaatcggacaatcgttcccctgctatcacaataccctttttcagcagtcttcaatcatctgtcaaaaaaattgtgaatataaatccattgaaccattaaccagatgaatcgaattacctttcttcagccgaaaggatgagaaggtttaggtctttgtatctttgacagtttcttcctccctctttacaatgtaatgatagtgtttactatcattttcttggatgaagaaaaaaagggggtcataccgcatgtattcagtgcgatttcaaaaagcggaagaatcgagccgctctgcaggagcaaaaggaatgaacctgattaaactgacgaaaaacgggctgcccgttcccggcggttttatcattcagacgaatgccctgacacgttttatggaagacaacgggcttcaagcagatcaggaacagatggagcgcgccattatgaacggcacgttttcaaaagagcttcgggaggaactgaccgcgtcgttttatgaattgagagaatcatacgcctctgtcgccgtacgttcctcctccgcgtccgaagatcttgaaggggcttctttcgcaggccagtacgaaacctatttaaatatcaaaacagaagaagagtttctcggaaaagtgaaagaatgctgggcttccttcttctcggcgcgggtcagcggctataaagagaaaatgaacaatgacaccgcagaaccgttaatgggcgttgtcgtgcaagggctgatcaattccgaggtttcaggagtcattttcagccgcaaccccgtcacacacgatgacggagaactgatgatcagcgcgagctacggtctcggagaagcaatcgtctccggcagcgtgacgcccgacacatttatcgtcaataaagatacatttcagattgaaaaagaaatcggcttaaaagaaatgtatatcgtttctaaagacgaaggcgtgacggaaaaagagacgaccgctgacatgagaagccgcttctgccttgatgacgagagcatcaaagagcttgccatgctgacgataaagacggaagaactgtacggttatcccgtggatcttgaattcggatttgccgaaaataagctgtatctgcttcaggccaggccgattacaacgatcgtgcaggatcagaaagcggcagacgaagaacgggaatttatcatgacgccccgggatcagaaagatttttggctcaatatggaggccaatatagaaggccccgtcagcccgttattcgcctcactcattgtgccggctttggaatacggcctcaaagagagcacgaaggcattccctgtaatgggcatcgaaatcgagcgtgtcaaacttcatcagggccgtgttttttccagacagcataagacggacgacaagctgcctgcagaacagttagaagcgcttttccccgtcttgactgaccgcatgtacgatattattcaggaaacctttctgcctttttatcaaaagctggacgaactggcgcatacagaccatacgccggagactgcccttgatgcgttccgaaacctgcaagacttctatttaaaaggatacgcagaacatttcaatattgtctttccgcaggttgcgttaaacatgatactggaatccatgtacggacaggttgagaaagaaaacacatcccttctgtacgaaatgctggctggcgtcatgaataagtcattggagaccgacagacagctctggctgctttccggacaagtaaaagacagccctgagctgcggcgcgtctttacggtttctcatgccgatgagctgcatcagacgcttctgcaatcaaatgagggaaaacgctttctcgaacaagtcggtgaatttttacaggaatacggctggagatctgtgaaaagtcatgatctcattgaagaaacttgggcggaaaacccttatttcgctttggccaacattcagaactatgtccggaacggatacgattttgacagtgagtttcataaaacgatagaaaaacgaaaacagctctacgccgactttatggatagaattgaagatgacggcttccgggagacgtttgaccgctattatcagtggacattgtcttcatccgtcatcaaagatgatcaccatttttatattgatgcgatgctggacgccaaagcgcgcctttgccttctgaaaatcggcgagctgcttcaaaaacaaggcgtaatcgatgatcgggaggatatgtggtacttgtacagcgatgaagtcgagaaagcgctcgtgtcgccggttccgatgcaggaaaaagccgctgaacgaaaacagctcttccagcaatatcaattgcttgaagcccccgcttatctcgggactccgacttcggaacagctgaaaacggctgaacagattaccggctccatcacagaagatgaaaaaaacactgaacatcaaatttacggacttgcggcgtcaagcggaatcgcaagcggcccggtgaaagtcattcgtgacgcaagtgaattttcccgtttttcaacaggagacgtgcttgtctgcaaaatgacgacaccgctgtggaccagtctgttccaggatgcaaaggccgtcattacggacacgggcggcatcctgtcacatgcggcgatcatcgcgagggaatacgggcttccggccgttctcggcacacgtgccgcgactgacaggctcaacgacggagatatcgtcacggtggacgggacaaacggcaagattacgattgtcaaacgcgcttcatgctaggtttccctctttattgacgggcagggcgggtgtatacttgtcctgccagtatttacgcgaggtgaaacatgttgagaacgacgaacaagagaattattgacgccgcgatgaatctgatcatccaaaaaggataccgcgcagcgacaacaaaagaaatcgcagaaaaagcaaaagtaagcgaagcaacgattttccgtaattttaaaaacaaacaaggattaatgaaagccatgattgaacagcagacgccggttccggaaagcatgatcactaaggcggaaggcgatctgtatgaggatcttcttcatttcgcggagacccttcttcagcaattggaacaaaaaaaagaagtgttccgcatctgcctgcgcgaaccggaactgttcgaagacgtcctgcaggatattgtcgtatatccgcaatccgtgaaaaagcatttaatcgtttactttaaggagctgacaaagaaaaatatgataagccccggcagcgaagaagctaatgcagacgtctttatgacgatgattttcggttattttatacaccggctgcagctggggaaaagagtcatcactctctctgaggaaacgatgctgaaacacagcactgagattttcatgaaaggcattaccggccggtcattttccggctccaaggaggatgaaggatgggttcaaagaaagaatgggcgctgatcgtttcgcttttgctgggagccatactcgttcccatcaattctacgatgatcgcagtcgccctttcatccatttcccgctcattcagcgaatcaattgccagcatcacatgggtagtgaccgtgtatttaatcgtgatggccgtgacacagcccattgccggcaaactcggtgatatgtacggaaacaaaaaaatgtatttatggggcgtcggcctttttctcatcgcatcattggggtgcgccctctcgccaagtcttttcttattgattttcttccgggcgcttcaggctgccggcggcgctttgcttacgccaaacagcatcgccatcatccgccatgtcgtgtctgaaaaacggcttccgaaagtattcggctttttcggcctcggtgccgggctgggtgcggctctcggtccgtttatcggctctcttttaattgagagcttcagctggcattcgatcttttgggtcaacattccgtttcttgcaatcgcacttgtgacggcattagtgatgtttcctaaatataaagaagaaacgtctgacgctccgcttgatatcatcgggtccgttttgcttgccggaagcattgtatctattattcttctgacgaaaaatgaaagctctttgggctattgggtgtacgcactgctcattctcgtatttgttccgctatttttcaggcgggagctgcgcacgaaacatccgattattgattttgacctgtttaaaaacacgacctttacgagcgccaatctgtcggttctgttaagcaatttaatgatgtacgccctgttattgattatgccgctctttatgaccggccacttcagcatgaacacgtcgcacagcggcatggcgctgtcagtcttttctgttttcatgtccgccagcaactggggcggagctcagctgcatcagaaatggggcgcgcgaagaatgatttttctgtccttcgggctgatggccgtagccaatctcttatttttgcttttggtttattcccattccgttccgtttcttatggcatcgcttatagtcggaggcatcgcgtcaggtgcggggctgacgagcatgcaggtatcttcccttgcgacggtagaaccgggcatgtccggcatcgcatccgggattttctccaccttccgttatttcggaagcattatttcttcagcgctgatcggtttaatctccgggtttcatattctgtttatcatattgatcggagtttctgtgatcggcttgttcgtatcgcttggtatcaagtccggggaaaccgttcagacgaaaaaaagccattcggcataacgaaaaaggttccgtaagcatctgctttccggaaccttttctagttttccttcttcattttctctctcaaagtgtcaccgcaatgccgtttgctctatgagaatcttttgatttacaagagaaaaggtgaatgtaaatggctgagagctcagatcaagttcggccgcttgcgccgtaatccggccgtaaaaaaagcccggccgccgtgttgttagcggcaccaggctttttatatgtgatttttcataattaataaaactgaaagcttattatttccaatgttttttcttaatttttttcataattctccttactaaaacctacctaaaacaattattgaatattacttttataattaagcaaaattaagtaacaatcattgaaggattctcagactgataaaatttattttaaatataatatttcaaaacacattgatcctccttctaaagttgagtcgcgtcactttagtagaatcataccgtggcttcccttgtcaaaaggcacagttcttttttacaccactacttgagactttaacgtttctctcatttgaattaattcaaaatagaattaatgggggagattacccccgtatttccaggcgatccaggtgggtggcctggtaaatattttgagtctctgtatctttaacaatagtatttacaatatcattaggataccgattcaaaaaaaaatgttctcctttaaacttatgaaatttcacgtttccttcaacaacttcactccatttatgcatttcattgatatgagtcgaaaaatcgctatccgcataaaaaacgcttactccacaacttattttttctgctttgggctgaaacttataattgtccaaaattataaaatctgctcgcaaaatcggaagaaacatatccataatctcttttgtataaaactcctctggtattcccccatattgttccacctttgtcaagaaagtttcattagtcatattttcaatgtcttctctcttttcaaaaatatgtggagcatctcgcccagaaaaaaacagatgccttggttccttagttcccatttgcttaagtttataatatatctcataagtcaataaggctcccatgctgtgtccaaatataacatattcatcgtcatattctaattgttcacttattcttttggcgatatcttcacttgcttcaccaacagactggtaacaaggctctgtgaatcgagttcctcttccagccaattcacatatacacaattcatatctatccggcagtagttttttccattcataatatgcatttaccgacgctccagcatatggaataggaaatacttttattttatttatttcactcactcctatgttcaacttgagcccactatcattactatataaacctataagtattcaagatacatttaattgtacttctctatctctcgctgctctgccagcaacaaattcaccatatcactatagctattcaaaccgtctgtctgattatttgccttcagatatacgtcatttgcatttcttgaaatacttgaaataacaccctcatacttatcccggtactgctcattttgttctatatcatgccgcaccgctttggacagactggacattatatcagacgccttatctggatccactttctttagctcagatatagaataatcaaatgccagaaataaaccactgtatagtatcattggatcatcctgctgcttacatgccagataagctataaaattagcctcatcctcatgcatgaaaccactctgatgtgccaattcatgcgccatagtagcaggcaccaaaaaaactggcacattaacattgatattggattcataagtaaaagggacaaaaataccatgtatccctgcatgcgacattagttttgacatcaccactggttttggtgttgaatatgaatgctccaaaacaggatatttctttgataacatttgcatcgagaacactgcgtgttgtgcataataatcaaaaacctctggtacatgagccaaaagatcagtatccgctaacttttcccttgccaattccatttcaacggcaagtgacttactcaatttaaccagttcttccttgctgtagttctcttctttatattcggtatgagacaaaaaagaatatctgtgatagtttattccacccaaaatagtataacaaaaatatatcacgctacagatcgtaacgattcctagagcaccacgataaactaccatcctacgtgcacctttactcatgatgaccttgcgcacataataaacgatataaaatagaaatagtaacacaaccaacacgacgagccattcactaacagaaaatgtgacccaagaaggtacaagtcctactgtttttgacaataacggatatacagacctactgtatttctccgcccaatcctgatggttctgcgcgtattttgtcagtatataagctataactccaagtgagatcaacggtaatctcttaagtaaaagcttttttataatgtactccccctatccaacataaccattataatcagttattcttaatatatatcctgctaaagattcatcttctaaaggttttggagttagcaataacctttccaataagccatacctctccttcatttatttttttattatttcaaaataaaacagctaagaaaatataattttcttagctgttttattttgaaatctagtttaggagttcttgaaactattccgaataattatgaaaaatcacattataatgctgtcatttcttcgtgctcgtgttcatcctgcacgaataaaatacctaattcatgatgttcgccttcataggacgcgcgctgatcaaaccggatctcaccgttcaggccgatgatctccatttttacaaatgcgcggtttttttgaagtgcttcataaaaatccgacacatgcttcacggggatgccgtttactttcgtaataatctcaccgatcttcagctcaagatcgtccgcgggtgtattcggaatgatgccgagcaccattaagccctgatcccgcttagagaaataaaacggagccgcgttatcgttcagccgctgtcttaatgataaaaacaggcgtccgagcaccgcaatacaagcggcagctccggcaagcggagtccaccaaagggccgctgccccgaatgcggtcacgataaccccgagaatcatgacacgtttcgccgttatccttatgctgacttccggaagtgacccctgcacacgctgtccgaagccggcgatataaggaatccagatcaaatggaaagagccgcccggcacggtaaagacaggccaccaagaaaggtgtgactcaagcccgctgcccggcaccaataagaaaagcggaagcagccatgcgcgattcgccaattgacggccgatgggcaggcctctgctgctgacgacaagcgccggagatgttttcagatgcgctgaacggcaggcagccgctccctccgtgataatcaaaaggcccataaacacggccgccgatgcccaattcacgccgaatgcctgcggaaaccgatccgcaaacggcactgtgtgggtatactgaaggagaaacgcaatgaacatgccggcgctgacaatataagctgaggacagccaattcatacggaacgtcagcgaagctaaagccgtcacggccgcgattatgccgagaagaccgaatggaatcgaaattcccagtccaaaaaataatatggagagaagaatacccggtataagtccttttatgtatgtaaagataagctcgtcatacatatctgcgatttttgtatgaaacgtatggcgttcacgtttaatccgcaaatatccgcaggcgagacttatgatgataaaaaaccaaaacatcgggtgcaaaaaaaacagaccgatacttttcagaagttcaattccccattgaacagacattgctttcaccgcctcaagccaaacattttaattctattctaccaaataatcattggcttgaatatctcaaacgtctatctctcttccgtcatccacaacgtcacattcgagagagagaaatctttcagatagtggtcgacttccacctcgattacaccgctgatcaaaagcatggaccgtttaatatccgtcagattgattcctaaacgtttatggtttttcattaagtaggtgaaataatgctttgcacactcctcattgatatcgtgaacacattcaacatttgtgtaattgaccaggtatctgctgaacagcataagaagacttagtgcttttgttgatgaaaatgtaacgtcttttgttcggtcttttagttgttccactaattcataatattttttttcacgcacaatacttgccctcttcaattgtgaacccccatttttttatccagataagcacgggtgattacagctgccgtgctgaagcgccgcaaacacttctgctttcgatactgaaatgcagctgccaaactaaaactgttctctattagaaccttcttttattgtaagaactaaaactgactgaggcaactttcaaaagtttcattttgaatacatattaactcggcataaagtctctcttctctataaatatcgggtaatgtttgtcctttataaatgtttaaatgtgaaaatttttttaatatcttgtcaaaaccgacataattatatgtcttttagttcatttttagagtgtgacaaaagaaacaggagacgtaaaaaacgcctccttttcatttattttacaaataatgattttaacgccatttgcagctgtaaatcatttttttcgtcagatttctgttcattcatcagctgattcattttttccgctgtctttttatcaatgaccgctgttttatcaagtttgtaccggtcttgaaacgccagaacggcttttttcattgttttgctgaaatagccgtctgctctgcccgggtcgaagcctaggcctttcagcaggatttgggcgtgtttgacatccgcgctgttcatatcaggctgaagcggctgtttcagctgaagcggtcccgccgcaaaataatccggctggctcacagcgattgtcggagcaatgccttttttgtggatccaattgcctttcggtgtcagccatttgtaaagcgtcaatttaatgttgctcccgtctcccataggcacggcctgctgaaccgttcctttaccgaaagaagtgtcaccgacaacgtcataatgtcccgcttcttttaacgcacccgcaagaatttctgaagcggaggcgcttcctttatccgtgatgacattgacgggatacggcttcttatgttttaaggttgagaaatattgttttttatcgccgttacgctccgcaatttggatatacggcatgtcttttgtgatgaaatgctttaaaatttgttcaacgctttgaaggtagccgccgggattccctcttacatcaaggacgagaccgtcaatcccttgtttttcaagctttttcagcgccgcggcgaagtcctgggcggtatgctcggaaaatgtcgatattccgatgtagccgacatgatgaccgcctgattctttgcgggaagcaaatacggtttcaagcgggatttccgctcttttaatccggaatgacagctgtttatcagtacccggacgctgtattttaatagaaaccttcgatcctttttttcctctgattttcagcacggcttcgtttaaacctttcccgttcattgactcgccgtttatgctgatgatttcatcattcggcttgagtcccgctttttccgccggagattgcttaaacggtgatacgataatgattttattgtcctccataccgacttcagcgccgatcccttcgaaagaagaatcaagagaatcggaaaactgcttagcagtctgcttgtccatataaacggaataagggtcgtttaatgtagacagcatcccctgaatcgctccttcaagaagcttttctttatctacattttccacgtattcgttcgagatcagctcatatgctttttcgattttttccattgcccggcttctttctgcgtctgatgaattcggctgtactgccccggcaatatgagctccgccgcacatgatgctgacggctgctatcactgcgatcattttctgcttcatcgtttacctcctcttagtccttttacgaaaacctggagatagtatgtgtaaattgcaaagaattcatgtaacggcaacaaaaaaatgaaaacgcgagattgttacatatatatgggtaacgtataatattttgtatgcaattcattaaatatacaggagaatgcgatatgaaaataaaattatcgattttatccgcggcggttctggccgcaggcattaccgcctttgtctggcaaagaacagaggccaatgaaaaaatgcagacggacgccctgtatgtttctcccgcaggcagcgaccaaaatgaaggaacgaaagaaaagccgttccgcacattaaaacatgcggctgaaaaggcagaggccggaacaaccgtattgattcgggaagggacgtacgatgaaacgtttgaagtaaagcatagcggcacggccgaaaagccgattacatttcggaactatcagaatgagcatgtctcaatcagcggcaaatctgcgccaaaaagcgattctgaaactccgttaattcaaatccgcaataaacagtacattaccattcacggcgttacgcttgagaatctctccgtatcatcagaagatgcgacggccatggggatctgcgtcaccggatcaagcagtcatatcaacattgacggcaaccatatccgaaacattaaaaccacggctgatgagggaaatgcacacggtatcgcgttttacggcacaggcgccatgaaggatgtcagcatcacaaataatacggttgaaaaactgacgctcggcgcaagcgaagcggtcgtgctgaacgggaatgttgacggatttaagattgccggcaataccatccgggacaataacaatatcgggattgacgtgatcggatacgaaggaacgtccaagcaaaacgactatgcgcgaaacggcgtcattgaaaacaatacggtgagccataactcttcttacggaaatcccgcttacggagatgaatattcagcgggcggtatttacgttgacggcgcagaacatgtggacattaagaagaacaccgtttacaacaatgatcttgggattgaagccacctctgagcataaagggaaatacgcacgagatatccggattacggataacaaggtgtacggcaatgcttacaccggtatttcaatcggaggctatgacacgaaacgcggcggcaccatcaattcggtgatcgctcataacattatgtatcgaaatgacacgaaggaccttgacggcggccagctgctgctgcagtacggcacaaaagggaacacgatcgaaaaaaacatcatgacggcaagcggttcacggatttttatcgcaaatgattatacgaaaaacgaaggcaataccgttaatcataacgtctatcacaaagaagcgggaaaagacggcatttggaattggaagaacagagaatatgattcattcacagcgtaccaaaaaggaacggcaaacgattcggattccatttatgcggacccgctgtaccgtgacgaatcgtcttatgactttacattaaagcccggatcaccggcccttcccgtcattcagtaacgaaaccattaaaaaaagccagtctatatcagactggcttttgtatttatacacgaaggaatttccggatggaagtcagacttccccatactccgataactgcgccgatcagaatgagcacaagtgatacttggaacacaaacggactgtacggcagaagtgaaacaaatgagccctgaactttcggggccacccaagcgaccatcgattggtacgtactcagcacgagagcgatcggtatgatagaaccgaatacccccagcagcagcccttccaggaagaacggccagcggataaaccagtttgtcgcgccgacaagcttcatgatttcaatctcttttcttctggcgaaaatcgtgattttaatcgtatttgaaattaagaacatcgccgtgaacagaaggccgatgattaacgcaatcccgatgttgcgtgacaccccgacgatcttaaacagacggctgacttcttctttcccgtatgtcactttatacacatgatcaagcttctcaatttttttcgcgactttcggcgtatcatgcggatctgtcgttttgacgataaacgcgttgttcagcgggttttcctgatcttgcattttcatggcctttccgctgtcgccgaagcttttgaccaattgatcaagctctttatctttagatgaaaactctacgctttggattcccgagatgtctttaatctcattctgcagcgtatcctgcgttttcttattagacgtcagatcgattaatactttaatttccacttctttttcagcatttttagccatgttgtttaaattcagcataatgactaaaaacacgccgaccaaaatcaatgtaacggtaacggcgctgatggatgcaaatgtcatccatgtgtttcttccgagagatttaaaactctcacgcaaatggcgcccgagaattttaatcataagaaccatactcccctcttgactcatcacgcacaataattccgtcttcgatcgcgatgacccgtttcttcatggtgtttactatttctttattgtgtgtcgccatcacgacggtcgttccgcggttgttaatatcttccagcgtcttcatgacttcccatgatgttaccggatcaaggttgcccgtcggttcgtcagctatcacgacgtcaggattgttaacgatggatcttgcgatggaaacacgctgctgttctcctccggaaagctggtcgggaaactgccgcgctttatgcttcagctgcacaagatcgagcacttcgagcacgcgttttttaatgactgactgctgctctccgatcacctcaagcgcgaacgcgacgttttcaaataccgtcagtttcggaagaagtttgaaatcctggaaaacaacgcctattttgcgccgcacgaaaggaatctctttttcttttacagacgcgagatctttatgattaatcaatatttgcccttttgtcggtttttcttctctgtaaatcattttaataaaagtagatttaccggctccgctcggtcctacgacatatacaaattctccgggatgaatcatgactgacagcccgttaatcgcttttacaccgttcggataggatttatatacttctttcatctctatcatgaaatcacctaatcttttaattatgtcttgcagccatagagttcgtaaaaatactgcggtttatggccgatttaccaggaaacagatgaaaaatctgaaagttccttttcctcagtacacttcattatacgtcaaatttagacatattactattacagtttcttttcattcccagaccgtgaaaaaaccttgcccctataacaggcaaggtttttctgttattttttctgtgacagccattttgcgatcttcgcggcttcctcatcatttacaagatggctcggcatattgccgcgtccgtttttaatgatgctttcaattttagcttcatcatacttcccgccgacttcctgtaaattcgggcctccgccgccttctaagtcttttccgtgacagccgatacagctttgctgataaagctcttctcctgctgacgcagatgcttttgatccgcctgagctgtcagagctttcttttttcgattcattggatccgccgcatgccgccagcaggacggacatggtcagaaccagcgccagcagcgcccattttgatttcatatgtaagatgcaccccttcgctattataaccccgtttacgcgcgtttgaaaccctcgccgagcacctcgcttgcgtctgcgacaatgacaaaggctgactcatcaatttgtttgacgatttgtttcagttttgtgaattcggtctggccgacgacacacattaagatcggccggtcatgttccgtatacccgccgactgcggaaatcttcgtcacgcccctgtcgatttctttaaacacggccgatctgacggcttcttcatgctgcgtaatgattaaagccattttggagcggttgaacccgacctgcacgacatcaatcgttttgcttgaaataaataccccgagcatcgcatacagtccctgctccactccgaaaacgagcatcgcgctcagcacaattaatccgtccatgatggcaaggcacgttcccagcgacagccccgtgtatttgtgaatgatctgccccgccagagccgttccccccgtggagcctttgccaagatacacgatgccgattcccgttccgatcccgacgcctccgaaaatcgccgccagcagttcatgggtcgtcgcggcaggcagatctcttgttaaatagacggcgagcggcagaacgatggaaccgaccagtgtcttcattccgaacttcccgccgagaatgatcactccggcgataaacaaagggatgttaataatccactgcacgtaagccggttcaaaaccaaacgtttctaaaatggtgctgatcccgcttactccccccgctgctatacggttcggcagcaaaaatacgttaaacacgatccccgtaatcgccgcgccgatcatgatgtatatataatctttgatcagacggagcggcttattgtgattcacatccatgcaaaatcctccgttctccgattttctctcgatagcattttaagtcttcccggcttagaagtaaataacagccaaataccgtattaatttgctaaagcgctgttgtgaaaaatggaaaaagagaacggataaaaaaacacaccttgccaaaggcaggtgtgttcccggattacgacagtttagaacgtaaataggcgtcaatgaagatatcgatatctccgtccataaccgcctgcacgttccccatttccgtattggtgcggtgatctttcaccatggagtacggatggaagacgtacgagcggatttggctgccccagccgatttctttctgttcgccgcggatttcgtcaagctccgcctgctgttcttcaattctgcgctgatacagcttcgctttgagcattttcatcgcccggtcgcggtttttgatttgtgaacgttccgtctggcacgtgacgactacatttgtcgggaggtgggtgatccgaacggctgaatcagtcgtattgacgtgctgtccgccggcaccgctcgcccggtacgtatcaactttaatatcttcggtacgaatatcaatgtcgatttcttcattgaattcaggcatgacttcacatgacacgaatgacgtgtgacggcggcctgatgaatcaaatggagaaatccgcacgagacggtgtacgcctttttccgcttttaagtagccgtatgcattgtggcctttaataagcagtgtgactgacttaattcctgcttcatctcctgggagataatcaagcgtttcaactttgaaaccgcgtctttccgcccagcgggtatacattctgagcagcatggaaccccagtcctgggattccgtaccgccggcccccggatgaagttctaaaatcgcgttatttttgtcgtatggttcactgagcagcagctgaagctcaaattcattcaattccttcgttaatgacttcagctctttctcaagctcttgctgaaggtcctggtcaggttcttcttttaaaagatcatgtgtcatttgcagctcttcgtgagactcgctcagctgatgataggagttcacgtattctttcagaccgttcgcttcattgatgacggtttgggccttctgctggtcattccagaattccggttccgccatcttttcatctaattctgcaatgcgggcttcctttgtttcgaggtcaaagagaccccctgaagtccgctaaacgagaagccatattttcgagctctgccctgatttctgataattccattccattcacctcattaaaagatccggggcgccataagacgcagacccggtcatgttcgcttcatacagtcgagactattctgtccggccgcagcaatttttatatttttttccgctgccgcaatggcaaggcgcgttgcgtccgatatccacaactttgcgcaccggcgcttttttcgcttgtttggcctcatcgccgtcctgcggctgatgagccgtcgtttggccctgaacaacttcttcgcgttccagattgctttcaatctcggccttcatgacgaatttcgcaacttcgtcctcaatggactcaatcatgtgctcaaacattgcgaagccttccatttgatattcacgcagcggatttgtctgcgcataagcgcggaggtgaatcccttgacgcagctgatccatcgcatcaatatgatccatccattttgaatcaacggcacgcaatacgatgactttttcaaattcacgcatctgctctgtgccgaaattctcttctttttcattatattttgtcatgatgcggtccatgatcatctcatgcatttcatccggttcttttccgaagatatcgctcttttcaagtgcgccttcatcaagatacgttgaattcaccagctccacgaggccgtcaagattccattcttccggaagctcctctttcggcgtataagcggcaatcgcacgctccagagaagacttgatcatgccttccacaatgtcacgcaggttttcagagtcaatgacttcaaaacgctgcttgtatatgacttcgcgctgctgacggagcacgtcgtcatattgaagaagctgtttacgtgaatcaaagttgtttccttcgacacgtttttgagatgattccacggcgcgtgacaccattttgctctgaatcggcgtggagtcatccataccgaaccggtcaagcatcgccatcgtccgttcagctccgaaacggcgcatcaattcatcttccattgaaagataaaattgtgtgatgcccgggtctccctgacgtcctgaacgtccgcggagctgattgtcaatccggcgggattcgtggcgttccgtaccgacgactgcaaggccgccaagctcttttacgccttcgccgagtttaatgtcggttccgcgtcccgccatgttggtcgcaatcgtgacagcgcctttttgtcccgcttcttcaataatctgagcttcacgctcatggtttttggcattcagcacctgatgcggaatccctttgtttttcagaagtttagaaatcaattcagacgtttcaacggcaaccgtaccgacaagaaccggctgtccggtcatgtagcgctgggcgacatcctccgccaccgccttgaattttccttccattgagcggtagatcaaatccggacggtcgtcacggatgaccggctggttggtcgggatggatacaacctgcatgttataaatattgcggaattcttcctcttccgtttttgcggtaccggtcataccggccagcttttcgtacatacggaaatagttttggaacgtaatcgtcgccaatgtcatgctttcattttgaatctccaggccttctttcgcctcaattgcctggtgaagaccttcgctgtagcggcgtcctttcatcagacggccggtgaaggaatcaacgatgacgacctggccgtcctcaacaacataatccacgtctttctgcatcgccgcatgggcttttaaagcctggttgatatggtggttcaaggccacgtttttgacatcaaacaggttgtcgatgccgaacgttttttcagccttcgtcattccttcttccgtcagctgaacgcccttcgttttgacgtcatacgtataatcctgatctttcttgagtgtgcggacaaacgcatttgcctgcacgtaaagttttgtggacttctgagcttgtccggaaataatcaatggcgttctcgcttcatcgactaaaattgaatcgacttcatcaataacggcaaaatgaagcgggcgctgtaccatttgttctttatagagcaccatgttgtcacgcaaataatcaaagccgagttcattgttcgttgaatacgtgatatcggctgcgtaagcttcacgcttttcgtcttttgacatcgaattcaggttcaggccgactgtaagcccgagaaacgcaaaaatttctcccatttgctgggcatcacggctcgccagatattcgttgaccgttacgacgtgaacgccttttcccgtcaacgcatttaaatacacaggaagcgtggacgtcagcgttttcccttcccctgttttcatttcggagatgttcccttcatgaagggcgatgccccccatcagctgtactttaaacgggaacatgccggttacgcggcgggaagcttcacgaacgacggcaaacgcttcgacaagaaggtcatccgtcgtttctcctttttcaagccgctctttaaattctgccgttttatgtttaagcgcctcgtcagagagattttcataatctcctcttacggcatcaatgtcatttgctattttttcgtatttgttcagcgcacgtttggtcggatcaaacattttatttaaaatcccaagcatctataacgctcctctatgttcacatgcagattttgcatggaataaatgataattttctgtccatgtatacctctcattatcataacataccttttgctatttccaaagaatttgcaggtaaagatagagaaaaaccttccgcgcgttcacggaaggctggatgggtttattcagtcggttcaattaatccgtatttgccgtcatttctgcggtaaacgacgtttgtgagattcgtctccgcgttggtgaatacgaagaaattatgtccgagcatattcatttggagaatcgcttcttcattatccatcggttttaaattaaaacgcttttgacggacaatttccgggctgtcatcttcaatttcgtcctgaaccgctacgcccgtatcagcagcgctgccgttctcgaaataatgtttcggaagaccctgctcgcggaattttcggttgacttttgttttgtgctttcggatttgacgttccagcttgtttgttgcgagatcaattgcattgtacatatcctcgttatgcacttcagaacgaagcgccagatcagtcatcggaatggtgacttcaactttggattccttatcattatagaattttaagttgacgttcacatcggcattgacgctctgctcgaaatatcgctccagcttgccgatttttctctccacatgatcctttaacgcaggtgtaacctcaatgttttctcctctgatattgtagttcatcaaagaacgcctccctttatctaaggatatgtaactatttctcttttaccccttctgatccctgctgaaacgttaaaataatgtgtaaattcggtgaacgatgacgaatggtgtcggttttatccggcagcttccgccaggattataagtatatgcggaggacgcaggcaaaagacctgccgcttgcagcaggtctagtgaagaacatacggtttgatgcagtcgtgcgtctgctccatccacagcttataatgcggcagaaagatggtttttaaaaactcctgaaaaggggcggacgggaaatcataatcatttaacatgctgaaatcctgaaagatctcgtcaaatgagcggatcgccgtctccacgcatcggcactcaatgatagacagcagaagcgcatgagaggaatcgagatgaaaaaaagcctgaatcaaatcgttgtaaatccgctcgccctccgtcttaaaaaaatcatcctgcgtgtccaacaggtagcaaagcccctcatcaatcgtaaaaagaagctggtagtaggctgacaccaaatggtaatcgttcaaacttctcaaaacactcacctatttgcgtttgtcgtaaaaacggccgtcacttgtcgtttgatgatacggattgaaatacgtattatggtagattcgttttttcttaagcgtttttatttcatttcggataccatcctgaatccgttttacttcgccggtaatcaggcggtccatcgcggccacctgctgaagcagcgttttttcttcttcggaaaaaggcggctttatgcccgcaagcatctcctcccttttctccgtaaatgccgtaacgctgctgatgagaccgtcgctttccggggcgtccttcagtgcggcgtacatgttcttcgtttcgttatacaaagaaaagacattgctgttcatcaggcaaggccgcccgcgccgtggctgtttttccgttcactctgcatggcctgcttccacgtgtcgcgaaattcagtaacgagcttttccgcttcatctaaaaactcttcgttattctgcacgttcgcatcgatcagtcggcggcggatgtaatcataaatggatgacatctgttcagatatctcaatctcccggtttaacgtgatgctgagctcttgaatgatgttttgcgcctttacgatattttcatttttggcttcaaggttgttttgcttcatcgcctgccttgccagcttaatgaatcgcaggcagccgttataaagcataagggtcagctcttccggagcggctgtaaagacggatgtctgctgataagcagcaaaaggattatttattgccatttttataaaacctccaaggttatgatgttgaagatcctaacattgacgtgagatatgaagattggctgttcaatttctccaatgccgtatccagtgcgctgaactttttataatatctcgtttcgatgtcatccagcttcgttttcatattggaaatatttgtttctatttcatccaggctttttccgatggcaaagctggttgataccgagctttccgtacccgcctgttttgaaatttgggtctgcattttgtttaaagtgtcttttaatctccgggcaatcccctgttcctccgggtttttggttttcgctgtatcagggctgtctgcattaaacagtttagccacgagagcaggattctcggtaattttctgtttcagtttcgcttcgtctttaatgacaagctttccttgatccgtataactatcagacgtctcaattccgaaatctgcaagctgatattttttcccgtcaatcgtaaccgttgagtacagatcaagccgcatctccgccaaaccgttctgcagcgtgctgtcgctccgtaataacccgcttttggcctttgcctcccactgctcaatctgcttatcggtcatcgcttctctttgttcatcggttagcggcttataatcacggtattttgattccgacgccttctcgtttacacttttaattaacgtattgtatttatcaacgaaatctttaatgttgttaaaaatgccgtccgtatcagtcgtgctgttaatcgtaaccgttttattgctgtccgtcacgctgttcagcgtgtatttgatgccgttgatcgtaaagttatttgacgtttttgtcatttcaagcccgttgaacgtaaacttcgcgtttttcccttcggcattggccgtcagttcatttgttgcatcatcaacggcaaaaccgagctgatctttcagaaagcttttggttgcgtcatcacctgctgaaagggtaaatccttcccccgttttattggaagtgaacgcaatcgtatccacataatccgagccattggagattttctcttttaaagccgtcaccccaaggcccgagctgttcagtttggaaatgacatcgtcaatcgtatcggtcgcggcgatcgtgacgtttacctcagtcggcttcgtttcacccggatttgtgacattgaatttcaatgtttggctctgacccgaagtgaaattgatggcccctgatgatttataagtcgtcggtgtggccagctgctgtacagacatgctcgttgaaatattctgttcagcactgacagccaccgcgctgacactggaatccgaacttgttactgtttttttattccagtttgtggacatcagcatattattaaatgtcgtagaatacatgtcggcaatctgggtattcacttcccgataagcatcgcgcttccattcaagcgtctgcttttgctggtttaatttattaagcggctgcttttcggcatccatcatttttttcaccagagaatctacatcaagaccggaattaaggcctgtgattcttgtgaccatatgtaccctctccttttcggcgtttagtcgtatacggctctatgacaacagtgagtttccgactgtttatcatatcacagctccataaatgtatgatcttattcttatatcggtcatattaaaaggttttcaataatttaactgcaaaatataatgtttcattttgtcaatagggttctttggcttgctgaagggggagatagctgaagaaataaaaaaaagaccctggagaaccaggatctttccgtcattaacctttcagcaattgaagaacttgctgaggctgttggttagcttgcgcaagcatagcttgagaagcctgagtaaggatgttgtttttcgtgtactccatcatctcagaagccatgtctacgtcacggatacgtgattcagcagaagtcaggttctcagaagaagtaccaaggttgttgattgtgtgctctaaacggttttgaaccgcaccaagtttagcgcgctcgcttgatactgtgtcgatagctgttttgattgttgtaagagctgaagacgcagctttagctgaagatgagatgtcgataccttttgtagcgtctttatttactgtagtagaagttgtagtgtcagctcctacagtagcttttttagttaagtctgcgccatcaatagcagtagctttaacagcccctgttttatttaaagaatttagaacgtcttcttgtgatgcagtaatagtaccatcagctttttgcgctaatgttacagttactgttttgctagtctcatcataagacgcagttgttttatctacatcagcacttccagccgcagtgaatgaaattttcacggcttgaccttgatcgtttcttacttcgagttcagagtttccatcaagtgctgtcttctcgccaacttggccaataacttttaaagaatcagcgttcatgttgttaattgaaaggctcatagtttgaccttcgttagcaccaatttggaaagtcagtttgtcagccgtgccatcaagcaatttctttgtgttaaactcagtatctgtagaaattcttgtcacttcagaagaaagctgatccatctctttctgtaactcgtcacggtcagaagtagtgttcgtgtcgttcgccgcttgtgtagcaagctcgctcatacgctgaagaatgctgtgagtttcgtttaatgctccctcagccgtttggataagagagattccgtcttgagcgtttttagacgccatgtctaaaccgcggatttgagaacgcattttttcagagatcgcaagacccgcagcgtcatcaccagcgcggttgatgcgaagacctgaagataatttttccatgttttttgcagcagagcttgaacctgcattcagctgacggctagtgttaagagccgcgatattgtggttgattctcattttgtatttcctccctgaattgtttttcgcacgtccttgtgcatttgcgcagcgtcattctgaagaaaatttttcctctcattggctacactatatatatcggatggccgtttctattgtttatattgaaaataaaaaaatcctcactttttttgtgaggataggttaagtaataaatcagtattaaaagatacagctctgttgttctcttccaggatcgacaagtagatttctttcctgtgaatatctacgtgctgaggcgcttcaattcccagcttcacttgttctccttcgatggcgatcacctttatttcaatatccggcccgatctgaatggactcattcacttttcttgagagaactagcatgatcctcctcctatcagatgttttgtttcataggaagcatcatgtaaaatgatttgtttcgccttcatttcctttttattgacgataatcggcgcttttaaattggcggtcgtgttttcaaaaggctcttccagcgttaaaatcgccatcacttcgacgtcctctatatcttcaatatgcaaaagttcaagcgtcgcatggtcaatgtcaaattcgtaccctttaaagaaaataaacggactggcgacaataaaagcgatgtgctcctgtttgacagactgcagcgccaaaaacggtgaatcttccgacaaaggaagaacaacaaattgagtctcgtcattaaatcccggcaggccgttttcaaatgagataatctgcccttcgtctattctgatttctccgtgatattttgttttaattatcatgcttcacaatcctttaccactttcatcttttattctgcgttgccatcgtcaaccgaaatcgtcaccttaggatcttgcatcatatcaatctgaactttccccggcgtataattccatacaggtttattgacggctgcttcaattgaaggtttgcgggcttcaatatcaatcgtaagctttgaaggaatacagtcaatgtcgacgagaaactgcgcaggcagaaagtcgctgaattcgccgaatggatcgggcggtctgacatctgctgcctgccgggccatcacattgcccgttttcttttcgatagccgccatttccttcccttccctgactgtttttgcaataaactcactgcaggcttccgcacctttctgggcggcttcagcgttcagcttttcaaatgatttgagattcaagttctcccaagccctcgtctgatcaatcgtcagtttggccggcgtactttcaatgttcagctctgccggcggctgctcgattttcaggtcagcgggcggctgttccatctcgatttcttccttttgaaaggttataccgattttagcaggcacactgtcaataatcaatctcggcatctgcacagagacccctcctgtttatagtattttagtaaaaaaagcgatctccctggtgtgagtcgcttttttatatattgaagacgatcagttctattatttcaggaagtcgatcagtgacggctgaatgatattcgcattcactgacagcgctgctctatggaccgtctgctgagataaataatcaacaatcacatcttccatttctacatcttcattatcggacaatactttttcagcggttgccgcttgtgattccaatcttgtctgaatgagttccaaccggtttgtgcgtgcgccgatattggatttttcagcattcattttatcagtaaaaccgtcaatatctgacagaatttgatctgaatctgcttcggacagcgtgcctttgcttaaagaagcttctaaggagttaagaaattcaaaaacattatctccattttgtgcgacgcctccgaaagctgagtttggatcagaattcactttcagcactgctccgttcgagatgttgatgttaacatccgaagcacctgtataattctcatagttgtacgtatatgtgccgtcggcattttcagtgatcggcgggacgtctgaatttgttccgttaaacagataacgtccgtttacctgagtattcgcgacagaaacgagctgctttttcagctggccgatttctgtaccgattgctttcaattctgtttcaccgttcgaatcacttttcgcctgaaccatcaagtcccggattttccccataatatccgtttccgagtttacgcttgattccgagttttccagccatgtaaagccttgcgaaacattccgctgatactggtttacctgcgcaagctgagtacggtactgcattcccttcattgcaacgaccggatcatcagaagctttcgtgatttttttccccgtagacacttgctgctgaagccgatcgagcttgtcataacttgagccgataaatcgaagagaattttttgcgatcatcccttgagttactctcatttacttatctcctatcttcctccggtgcccataccgttaataattttatcgaatatttcatcttgcatcgttatgatccgcgcagcagcattataagcgtgctgaaactgaatcatatttgtcatttcttcatctaaagacactgcactgactgattgtctccgttcatcggctgaaagggtgttgctttcagagttgttcataagattggccgctttttgtgaattaacgcccagctttccgataagggattcataaaagtcattaattgtagtggtttcaccgttaatagtcaacttgctgttctgtacggctgcaagatttgtcgcgttggtgccgtcacttttttctccgtttaacgacgctgcgatattatcagtagacgcaaggattttgtcactgacttttattttcgctgccgcaccttttgccggcaccgcttcaccgccgctgaaatcaaaaaatgctgcaccctgttcgcctgtataggtcttccctttttcatgaactgcattaaacgcgtcagcaaaggacagcgccatattgtcaagagccgtcagcatttcaggataaagacctttttcttctccatttgacatatagccgtatgattcaataagacctaagagtgagccttttccggtaaatgcatccgcattgaccgtattgctgccgactgacacactcgacacgaggccgctgtccttatcgtagttgattttcatttctgaaactgtttttgtgttaccgtcgagcagcgtaccgagagaattgttgtttccgttcagcaattcaacgttaaccgtgccctcagcagtcgccaaggcatgtccgcccgacttattatatgaaactttaatatttgccatagaagataattgatcaatcaatctgtctctttggtcatacaaatcattagggagcataccgctcggctcaactgccgctatttgattgttaaggtcattcagctgattgagaatggaattgacctgatccgctgtgttatccagattctttttaatatcaccctgaatgttagtcaaagaggtagatatatagttaaaactttcggcaagagatttcccctgctcctgcaaaactgagcgcgctcccgtattttccggattcgtcgccagatcctgaagggcattccaaaacgaactgagcgatccgtttaatccgttatcgtcaagctctttcatgacgccttccatttgcgacaatgaattggaacgggctgtatagtaccctaattttgtattttcagttctgtactgatagtctaaaaaactgtctctgacgcgctcaactgaaccggcttttactcctgttccgatttggccggccgtcagatcactgttttttgatacagcgggataagggcttgtcgattgtaatgtgacgcgctgcctcgtatatccttctgtatttgcatttgcaacgttatttgaaactgtgctcaatgcagtctgctgcgcactcaatgcacgccttgctgtttccagccccataaaagtcgatggcattgaaaatcctccgttctaagcttttgaatcgaataatgtcaaacggctgacaggcttgcgcgccgcttgcggctctttataattcatattctctttttcacccggcatgatcatatcgaatgccccggagatgaattgtaaagcctgaatcgtgagctgtttgttcatctcattcacttctttcagacggtcaagaagcgcagacaaagagtgaaataacccttcaagctcctgtttttcactgcctgaagttctggagatgcatgcagcaattgtattgtcctcaccgcggctgagaaactgagaagttaacctgattcgttcttcctcagtctgcccgattgcctgaatatacttttgctctttggtcaatatgttggagagctcttttgttttacctgctttcagcgcttccgttttctcctcagacagcgtgagcagatgttcatgcagtgcgcaaagtcgcttcagttgatcaataattggctttgctgacattggctttctcctttttattgctttttatagaaattcactatgttttcagcgatgctgtttgaatctattttatatgttccgctctctatatccgctttaagctgagcgattttttcctgtcgtgttttagtgaccgcatctgacgcattttgaagctcttttgcatgagaagaaatttccactttgtccttcggctttgcagcctctttttgtacggcttgcttttcgtaatttttttggtatggattaacggattgtgttccgtactgattgattttcataggattcctctcgctttctgttcgcagtctaattcttttatcgactgcgttatcagttagtttagggaatcaggtgtttttggtattataggcatagtatgtgtcttttgtactgtttttatcttcgaattcagcggctgttttttggttcatatggtctaattgcgactcaatatctgtctgacaggacttgcaaaatttccccgtcctgattggatttccgcacctttcgcaaggatatgccaaattcggaagctggctgatctgaattcttttttgtttgataaacttgaggatcagctcttcatccacacctgtttcctcagtgatctgctgcatcgtcgactgtctgttgatctgctttctcaaaaatttatagacggtttcaaatgctttttcttcttctttaatacatgcctggcacacggtctgcaggttcgttttaaaaaataaagcattgcattttggacaattcgccaattcacccatcgtattaactcctattccttctttaatctgccttatatttctatcaattatatcggcagaaaaaaaaaatgatttagctcctgattaaagtaaaagaggagaccgatgacgctttacccactgtcagcaggacttcggcggcttggtgaagtgtggcgcccgtcgtataaatatcatctattaaaatgacgttcataccttcggcggagttttcggctgctgaaaactttttttctgcagacagcctgtctgttttgctctttttggattgtttttcgttgttcagtcggatgaggggggaaatgacgggcattccgagcagagaggccagcagctcggattgattgaatccgcgttccgccagccgttcgccgctcagcggaatagggatgagagtatgtgtatttgatggatatgccgctttaaagccggcagcaaagtcacgttcaaatgcttgaatgattttcgcatcacccctgaatttaaaacgggccaatgagtccttcatcgcatcattatacaaatataccgaacggtttcgccgcagcaaaaagcgcttttccgtttttgattcccgggccgcacaatcagcgcatttttcatttgactcctgaggcctcccgcatatactgcatacggggccttcaattttttcgaattggctgctgcatatgctgcatacctcttgctcgggcgccagagaaaacagagatctccaagtcaatgaacttgaaattggtgagtcacacaataaacaattcagagatattacgctccttcccgagtttcacagaactcgcttggattaaccgaaacaatcgccgctgattcagccagaatgacaagcagtgccgtatttttctgtttatcaactatctctgcttttgcataagcaactttctttttatctgtaacatatgccggctcagcccggtttaatgaaagtgccagtacatcatttttgcatacccggcatgtgcatttcatatgaagctgagacatatggcggtcgagaagttcctttaatacgatttcttttgaattgacaagcatgctgacagctcctcataggaaagtatgagtatactgtatcacgttttctgaaattaactagtccaacaatttacttttttgtgccaatttgttcatatgttctatatgtttttttgcttttttcattccgcttgtgattccgaaatgaaacatgacgacatcaccgctgaaatgtttataatgccttcctgttctgcccgcgatctgtacgagcgcgctctcagtaaagataggtgcttctgcgccgaggacacatgtctgaactttgggcacggtaacccctctttctaaaatcgtagtcgttaccagcaggtcaagccggccgtctctgaaccgtttcactttatcctttctgaatgtgtcttccgcatgaacgccttctgcccttacatttaatttctgaaaataatccgttgtctttttcaatacatgtacagacggaacgaataagaaaaccggcagctgtgattgaagtttttggcggacccaatcggttacagagcgcggcagttttcctttctgaagcttcttcttccaattgccgcaccacaaaaaacgcggctccgggaggggtttccgatgatatctggccggtatgcggacgcttttcagcaaaccggcttcagccttcttttttaatgtgtctgaaggagttgccgttacataaacaagggcgctgtttttcttcctcgctttatcaacagcgaatcttaatgtctcatcggctgaaaaaggaaacgcatctacttcatctattatcatgacatcaaaaatgtctcggtagcgcatcagctggtgagcggttgaaatcattaacggagtcagacggcctttgtcctcgctgccgccgtacaaaacagaaacttcgactttctcaaatgcttttttcagtctcggcagcagttcaagtacgacatctgtacgcggagtcgcgacacagacgcgcaaaccgtgattcagagcaaactcgatacccggaaacagcatctctgttttccccgatccgcaaaccgcccatactaacagctcttgtctctcttttatcgcatctgtaagcgcggcggccgcccgcttctgtccgtctgtcagtgttccttcccaagaaagctttacaggttcccagctgttttcataggcctgattccaataatataatgatgtcagttcatcagcccttcccatcatgacacaggcacggcaataggtaatctgccttttggcagagggcgcccaaaatgccgcaaagctggcttgatcagactgaccgcatcgttggcagacgtaacggtttttccggcggatgattgacggctcgtccgttatatattctttttctgtaaaacgcttgatgcgctgatctgaaaacggtatctcagatctcaataaatgccggccgtaaaagaaatcccgcacctttgaaaattctgaagcaccttcggacatctccctgcctcctttctgctcaaagtatgccttgtcgggaacccacttgtcgaattgcgaaaattaaaaaataaaaaaatctccgcccttgaaaacggagattttcacttagtttttaaagcaccagccgattccgatggcgccttcgcccaaatgggttccgatcacggcaccgaaatagctgttatagaattcgacatgaggatatttaccgcttaactcctgtataatatccgccgcttcttcttccctgtttgcatggatgacagcggcccgcatcgggattcctttacttgcatcctccccaaacagctcaaaaattctcgaaatcgcttttttgcgtgtccgaatcttctcaaaaggaacaattaccttattgtcaaaatgaagaataggctttacctttaacagaccgccgataaaagcctgagcactgcttagacgcccgccccgctggaggtgtgataaatcgtccaccataaaatacgcacggactgtttttttcatttcttccagctcttttataatctcttccggtgagtcaacaccgtctttaatgagctgtgctgcctttaatgcataaaaaccttgtgccaaacagctgatctctgaatcaaagggataaactttaatatgatcaaccatagtgtttgccgaggcggcgctgttatatgttccgctgattccgctggacaaatgtatgcttatgactgcatcatatgttttgcccagttcttcgtacaatgcgattaattcaccgaaagaaggctgagacgtagtcggcagctcatcatgattttttacttctttataaaaacttctccagtcgagttctgtttcttcgcggaatgttttttcaccgaaaaccacttggagaggaatcatatgaatatgatgttcttctctcatctctttcggaatatatgctgtactgtctgttacaactgcaatcttcatcactttacctgccttattaagtacttaataagtattttaatagatatgcagctgtaaaaaaagacttgccataacaggcaagtcttctcacacatggctaacgcatctctacccagccgtttttaatggccacgacaacggcttgtgtccggtcattaacgttcattttctgcaaaatattactcacgtggtttttcactgttttctcactgataaacaatgattcaccgattccgcggttgctttttccgtctgcaagcatttgcagcacttcacattcccgtctcgttaatatatgtaatggtctccggatttccgggtaaacctcatgctgaggatgagcagaaactccgcttgtcgcaagacggcggaattcgttgacaagattgtgggttactttcgggtgaaggtaagaaccgccctcggctaccactttcactgcttcgattaaagtatctgcgtccatctctttcaggagatagcctcttgcacctgtttttaaagcatgagtcacatagttttcatcatcatggatggagaggataatcaccttagattcagggtacagctcaacaagctgtttagtagcctctactccatttacattcggcatattgatgtccattatgacaacatcgggatgataatgctcgacgattcgagccgcctcatctccatcgtcaccttctgctaccacttcaaaggtaggttcaaaatccaatattctttttacaccctcacggaatagttgatggtcgtcgataataacaatatttactttagtcacacgctacgcctccttatcctattgttctatatacgccgctgttcggtcaatatgtcttttggctctatttaacaaattataggccgagagataacggaaccttaatcatgataaatgtcccaagacctattttagagtctatcgttatcgttccttcaagcagatctactctttctttcattcccagcaagccgaatgacttgtttttcttttgtttagcatccttaatatcaaagccttttccgttgtccttaatgatgagaacgacaaaatcagcggttacttccacttttactgtaatttcctctgattctgaatgcttgagtgcatttgtgacggcttcctgagcgagacggaaaagcgccacttcaaattgcggggcaagcctttggttctccgtgtctccgatacactgaaaatgtattttcacctttccgttgtattcttcagttgtataaagatattttctcagtgtcggaatcagcccgagatcgtccaatgccatcggtcttaaatcatatataatccttctgacttcgtaaagggcattccgcacattctgccgcagatttctgatttcctgaaatccgtcctccgtgccgcggtcgcggaagatccgttcaattaattccgatctcatcatgacatttgccagcatttgcgcgggaccgtcatgaatttctctggaaactctttttctttcttcctcttgggcttcaatgattcttaaaccgaaatcttgtttagcctgcgcatcggcaagaagaagccctacttggcgaaggtcttgattcaggtaattcagaacgacggttatttggctgaccaatgattctgaccgttcaatgatttcctgaagccccaaaagccggcgttctaaatcatctctgcgctcccgcagctgcttttcacgctgttggatcatcgtcagttccacttgaagtttgtgcgccttttcataggcgttgcgaatttcttcttcgctgaacttatggaaatttctgcttacttcagacaagcggtttcgtgcgtgccgcgtatgaacttcaagtttgtcgcccagctcaatgacttcgtagacctgctgtttgatctgtttgagttcttcaaccagctgctcatattgctggcgcgactgctctccgatttgaaaaacctcgtccttgctcccgtccacggttttcagcattttcataagtatagaatccaaaactttggagtccatcttcgatttattcatctgtctccctccgtaacggtgttgttatgtatttttattataaatgtaattgaactgcaatttatgtcgaattataatgaaagaatgcgtatattctagaaaaaaacatttttatatagtatcttactctttcatgataccaaaatatgcgcaaaaattctaaagtctgttcgaatttgtagaaacaagtcttttaatgcttgtcaggagggtccagcaatcatgctgcacagctatttaacagttaaagaaacgggtgaacatgagattgtgattgaaaaatcgcgttttatgtgtcacctgagccgtgctgcttctgaagaggaagcgcaggaatttatacaaaagataaaaaaacagcactggaatgcgactcataactgctcagcttatctgatcggcgaaaccgaccatatacaaaaggcgaatgatgacggagaaccaagcggcacagccggcgtccccatgctggaagtgctgaaaaaacgcggtctgaaagatacctgcgcggtggttacccggtatttcggcggaataaagctcggtgcaggcggattgattcgtgcatatgggaagtcagtgtctgaaggcttaaatcatataggagttacggagcggaagctgatgcggattatgcatacatcagcggattatacgtggctcggcaagatagagaacgaactgagagagtcagtttttttactgaaagatatccattatgcggatcatgtcgaatttgaaacgtacgttgaagaaaaagacaaagaagcgtttatcaaatggatgacagaactgacgaacggcaagagtaagaatacagagggagaactgacgtatttagaaacagacgtcagccctaaaggagactaatgtaatggctgaacgtgtaagagtgcgtgttcgaaagaaaaagaaaagcaaacgaaagatcatattcaaacgaattttgctgctgcttaccctcgttttgttagtcgctgccgggtttggcggatacaaagtatacaaaacgatcaatgcggcagataatgcatatgatgccctttcccgcggagacaaatcaaaacttcgggataaagtcatcgatatgaagaaaaaaccgttctccattttgtttatggggatcgaaaattatgccacaagcggaaaaggcggacgatcagactctcttattgtcgttacccttgatccgagaaataaaacaatgaaaatgctgagtattccgcgtgatacgcgggtgacgcttgccggcgatacaaccggtaaaaaatcaaaaatcaatgcggcttttgctaaaggcggggcggatgaaaccgtctcaaccgtcgaagacttattaggcataccgattgataagtatgtcactgtcgattttaacggctttaaggatgttattgatgaagtcggcggagtcaatgtaaaagtgccttttgacttcgacgagatgagtgacgtcagtaaaaagaaacggatctacttcaagaaaggaaacatgcatttgaacggtgagcaggctctggcttacgcacgcatgagaaagcaggataaacgcggagacttcggccgtaatgaccgccaaaagcaaatcctaaatgcactgatcgaccaaatgtctaaggctggaaatattgctaaaatcgataaaatcgctgaaacagcaagcaataatgtccaaacgaatattcgaatcactgaaggactcgcccttcagcagatttacaacggctttaccagcaaaaagattgatacactgaccataacaggatcagatttatatttaggcggcggcggaaccgcgtctacgggcggaacgtattatttccagcccgatccgaccaatctcgaaaaagtacggcaggaattgcagaaacacctggattacccgtccggaagcagcacggcgtccgatcctgcttctgacagcaccggaacggacagtacgactgattcgacttctgacagcacaggaacaggcggtacggctgattcgacttccggcagcgcaggaacaagcggtaccactgattcaaccaacggtactgccggtgcaaacggtacggacagcacacagtccggcggcacaacaggctattaagagtaaacccgatcctttgagcaggatcgggtttttttatataataagagaatagcagaatccacaaaaaagcagaccattcgcatgatctgctctttttaatttttctttaccagtctcttgtaaaacttggtaaatggtttaaattgttcatttactaaccctgtgacctctgctatgatttgcataaatacaatcaatacaaaaataataaacagcgaaagccatatggtcgcgcttttcagcaggatggcactgacgctgaaaataaagccgattaaataaatgataatgacagccgtgcggtgtgacagcccgaaggccatcagccggtggtgtatatgtgacttatcaggcgccgaaatcggctgtttgtttaaaatccgcctgatgacggcgaatgtcgtatcaaaaatcggcacgcccaaaatgatgatcggaatgatgatactgaataaagtaacacttttataaagacctaataatgagagtactgagatgacgtatccgagaaagagcgatccggtatctcccataaatatctttgccgggtgaaaattataaaataaaaatccgagtgtgcttcctatcacgacaagtgaaagtgacagaataaggattttccctccggataacgccataacggcgatagtggagagtccgatgaccgacaggccggcagcgagtccgtccaaaccgtcaatcaggttcatcgcgttcgtaattccgacgatccataacacagtcagcgggtaagcgacccatcccaattctaaacgttccgttaaaaacggtacggagaaaaagtccattttcagtcccgtgctcacaatcataatggccacggccagctggacgaaaaactttacctttgcgcttaattggtatttatcatcgaggattcctaaaataacaataataaacgcacccactgtaatggcggtcatttttgtttcattatatatgccggccgcgagcacacccgccgctacgccgataaagatggccaggccgcccatacggggcattattttatcatgtacttttcggttgctgggctggtcaactgcacctattttgatcgcaattttttttacgataggagttaggattaaaaccgttagcagagagacaaaaaacgcaacaactatgcgaaacatgcgttcgtcaagcataaagaagtctcctttggaattatatgaagtcttttctgatattgaaccgttccttccattataattcttactagttattataacaagcatcatcaaaaagaaacacgcaaatgaaaaaatgcgctttcccttttaatgggattgcgcatttttcaatatacccgtgcattcgagcattcggccgaataaaacattccaatcccgtctccgggccaattcacggcgcaaagcctcgtatgatccgctgcggtccgctgccagaagcgcgtcgcaggccgcgatgaaatctgcggggtcactgccttcaacgtgttcataaacgaaaggccttttgatttttgacgtagaagaaaggttgcagccgacaaccggttttccggcggctaaaaattcaaaaagcttgagcggaaataccgcgtcattataaggtgaatttttataaggcatgatgccgatgtcgacaagctgcatataggacggcacttcattcggcgcggcaggtcccgtccagatgacattcggacgctccagaagcgacttgaaatccggatcgtcctgagccgtgttcgggcctaccaataaaatcgtccagtcaggcctcacatctgccgtttccgccataagcgcaaaatcgagcttcggtttgattccgccgataaaaccgagaaccgttccgttccgtccccgtaaaatgtcttcatccggctgtttattttcccgtgaaaacaggtcatattccactccgttttcaatggtgaacactttctggtgcgggttctccagcttttttccgacctcctggtgcagacagtcagatgtacacgtaatggaatcggcacgctgaatgattctcatttccgcctgtttaatgatgtttcttctaacatttgacagcaccccggaccggccgctgatcggagcggcccacagatcactgcaatcgtaaatcacttcatcccaaggaaacagatctgccagcagcggaaaaccggggaaggtgtaccataagcagcagcgggccccttcaccttcttccttcagcatgttcaccaatggtgaaagcttatgcctgtagcacatgtctgtatacctgccgaagcggaaagctttttgccgcatgagatcctttacagtgaactgccggattccctcggcgatcccggccatctgaccatcattggctcgcggagacgggcatacccaaatgacgcttttcgtttctttttgccgggcgagaaattcagccagccggtgccgtctgtatctcagccggtcatgcccccattccgccgctccgacgattacgtgaataatcggttccaccttcatcacccagctcctctgacgcctacagtcttttcaagaccgcgttttttgcatattgcataaaacaccacgaagccttgataaaatgcaggcgctcaatttctctataaacaaaccacgttttttttgcggctttccacttgttgcttgaaatcgaattctgcacaagcctgtattctgaaaggcactcattcaggccgtaagccgtaaatccccttttcagcagggaaagccatgtcgctaaatcctgccgcgttctgatatcaggcatttgaatctgccccgtctgctctctgtcaatcatgaccgttaaacatccgataatcgtgttttttaaagcttcatcatatgacaggctttcaggggcttgaatcgttttgtccgtcggcgttccgtcctgctccatgacgctgtagcccgtaaatgaaaaagcgcaggaccgctctgccataaacgcaagctgtttttgaagcttttcctttttccatctgtcatcgctgtccagaaatgcgacataacggcccttggcatgtttaagggctgtatttctggcagccgcggctcccccgtttttctctaaataaacgacgcggatccgctcatccttttgttcatattgccgtaaaatatctctcgttccgtccgttgaacaatcatccgcgataatcatttcccaatgcgggtggctttgatgtaaaacagactgaatcgtgtcttcgatatattcacttgcattataagacggtgtaatgacagatacgaaaggtttccagtttgtcatggtcacatctccatcgcagatttttacaaggactctctaaaaaactcaggaatgacaatgaacataaatgcaactgcaatgccgattaaaacgcccagaaccgctttctttttcggcggcatgccttgtcccgccgtttcattcatcggctctgaattgatgatgccggccgctttcaggttcagctgcgtatttttcaattcgtataaaaatcgttccttatccactttggcgtccgcgctgacggtttctccttcaagcgcagcaatactctgccgcactacttttgcccgtttttcaaacaggtcctgatcattcttcagaaaagtttttatgacggcttgaaacaccgattcggtctcctgtttgttttggccgctgtagctgaccgtgatcaatgaatctgattgtgtttcgacagtcagtttacttttcacggccgctctttcttcgtctgttttatcaggcaaagcctgctttaaaaaggcatcgctcgtcaaaaggagcgggatttcttttgtattgttataaagcggatgatcataatttcccgcggcgatcgcggcttctgatgtaaaactgctgcccccgctgatttttgacggcaatacatatcccgctgcccctaacacaacgggcagcgcaatgatccaaatgatattctttttgatacgctgggttattcttgtcaacatatccttcatctcgcatctccctgtttttcatagtacgccgtgacggcaggctccttttgtaaacgcctcaatatattgaccgccgcgatcacgagcgagagaaatacccagtggaaaaataaatttgatacggagcttgggctgatgctgcttaccaaaaaaccggccatcgccgtgataagtccttctgtgatcagtcttgactgattttccgattttctttcatgacatttataaagtgtccaaaaaaggaacaaatagactgtcaggtaaccgagcatcgtaagaacgccgaagttcgccataatctcgacgagccagttgtgcacctcaactacgccgcccgtatcataaacgggctctgcttttaaatagtaagagacgtttccggcacccactccgaacccccaggaatcaatcacatagtgaaaggcgttttttaaaagattcgccctcgcgaggttggaaggaagcggatgctgtcccggcatcgcctgcggagctgaaaacagattcaagacggcattggtgatacggcccgcaaataaaaccgcaaacagcgccgcacccgctcccgctgcgtacagcgcgagttttttcaacagggaaggcagcaggatgaagacgtatacagccgcccccgcgcatatgcccagcagactcgcgcgcgaaccggtcaaaatgattaaatacaaagcgcagatcgcaaagagcaggctgacggccttcacatagccgtttttcatatttttcaccgccgccgcatacagaaagaaactgatgcacaaaaacgttgcgaaatcattttgattaaagaaaacggacgtcggataatgctgtttgtactgcgggccgttataaagcgtggagctcggcagatggtggtgtgtaaaatgattgtaaaagccgatcgccatcacaaaaatggtcatcacaagccatatgccgtaaaaaaccatcagctgatcaaagcgctgaatgaacatgacaataagataaatcagaaacatgcccattcccattaaagctaaatatttaatcccgtacgtcacggattttgcccacaataacgataggagaccgtatgtaaaccataaggcgaaaaacatcagaaccccttttacattcacccgattccatctgtcaatatgatgacggtttgtcaggatgccggcgacgtgaagggcgcccgctccgattaataacagccggtatataaataagctgaaaaatccgagatggaccgcaaagaaggcctggtttaaaaatgtacacgcgatcagtatataaatgagccccataaacatctgaccgtttgttgtaaaggcggatagcaaagcaagtccggcaataccgatcatggcggcaagcagcagcacggtgatttttccgaatccggcatccgtcctgaccgcctccagcgtgatgaatcctcctgtaatgagagcggcaagcagcacaagaacatgtgccgctgaacgtttgatactcacatggcaaacccctttccaaaacagcagccgagccgggctgccgagagcctgaagacaaatctttttctatcttgccagttcttttatttgccgatcggcatgaaccgccggacgtccgacggaatgataagtgaatcctgaaatcctcatatactccagcggaaacatatttctgccgtcaatgataaccggctgtttgagcagctgcttcactctctgaagatccatctccttgacttccggccaatctgttgtaatcaggcatgcgtccgcgtttttgatggcactgtacagctctgtgtgatattcaatgccgccgtctcctaatatcgctgacgcttcgggaatcgcgatcggatcatacgctttcacatgagcgccctgctctttaaggcttgtgatgatatcaagagccggggcggagcggacgtcatttgtgtgcggtttaaaggccagccccagtacggccgcggttttcccttttaagggaccgatggcgcggttcaatttttccgtaatacggacccgctgcttctgattggtttcaatgacggcttccatcatttgaaacggatagccggcggcgtttgcgatatgcaataaagccgttgtatccttcggaaagcaggatccgccgaatccgatgcccgcctggagaaatttattcccgatccggctgtcaagaccgacgccttctgacacgtgggaaatgtccgccccgacacgttcgcaaatattggcgatatcgttaataaaagatattttcgcggctaaaaaagcatttgcggcatacttaatcatttccgcgctttcaagattcgtctttacgaccttcgtacggaacggcttatgaagctcttcaatgaccgaagcggcatgttcgcttgtggcgccgatgaccgcccgctccatctgcatcgtatcccgcaccgccgaaccttcacggaggaattcaggatttgacgcgacatcaaacggatattttccctttgacgcttcgctgacgatttggtaaacgagctttcccgtcccgaccggaacagtgcttttggtgacaatgattttgtatccgttcagctgttctccgattgtttgcgccgctgccttaatgtaggtcagatcggcttcacccgtctttgacatcggcgtaccgacggcgatatagatgatatcagcggctttcacagccggctcaatgccggccgtaaaggataagcgcccggcactgacatttttttcggctaattcctcaagtcccggttcatatatcgggatgactccgttttgcaagcttctgattttcgcttcattgatgtcacagcaagtcacatgatggccgatttccgcaaaacaagttccagatacaagacctacataccctgttcctaatacagcgatttttttcacagcttcatccctctttcgaaaggttctcctcttgcccggcccggttcattacggatcggtatttctctttcagcgttttcgcgttttggcttgcgtcaaaatacatgcggacggtttgataaagttcctcggctgtttgcggcgtccaagcctctccttcgtcatattgcagaatcgattctgccagcgtctcaggtgaacccggcttgatcagcaacccccggtgtttcccgaataaagaagccaatcctccgacatcggtgcagatcaccggcmccttcagagcgagcgcctcaatgaccacagtcggcatgccttcgctgtaggacggcagcgccattacatccgaagccagcagatagtcctgtaccttgtcgttcggcaattgccccgtgacgatatgagcggcttcacgcaatgaagatgcggcgggaccgtcaccgacaaagacggcttcatacctttcatccaatgattgaacggcttttgataagtcgaaaacgcctttctctttgacaagcctgccgatgaacacgatcagttttttatccggaggaaggccgagccgttttctgacggcttctttcgtctcgttcctttttcggaaggcgtcaagcgtgatgccgatcggaagcacggtgcactccgcttcgataagctttttcatttgttcccgcagactgccgctcacagcgtaaatatcggctgcttcccgcaccgcaaatgtaaatgcgcgatgagcgcttttgctgtaatgcggatagacattgacatcactgccatgcaaggtcagcacatacggaatgcctaaagcctttgacacaatggcggccgctccgcctgacggcatggcgaaatgcgcgtgaatcagatcgggcttcaggccatgatttttaatcgcggaaagaaccgatgacgccattcttttatgcggctgcgcccatttcagctgcccgggaaccgcctgataaaacggccggtggacggacacgcctttccgccattcatgcgccggcctgatatccttttgccgatatgtctttttcagcacccggaatggcgcggcgagtttcggccgcggacaaatgacggtcatctccgcgccaagctttctcagttcttgggcctgcgtctcatgaaaaacgccttctcccggcttctcactgctcggatagacacttgtcatccacaataccttcatagcaaacgtccttttcttaatttacttttcatatgcggataagcttttcctaacaggaataaataacacaacgcgccgcaggctacggagatcgccagccgcagcttgacatcaaggctgatccgctccgtgccgaagctggctgtaaaagcgatgacacccattgccgccgtaagcagaaacggtttggccacggctttgaagtaagccgacagccgcagcttaatgacatatgccaacagccagcgcccgatcaggaaattcaggatgctgatgaaagcgtacgtccaggctaccgtcaagagatttccggacagcacggcggcgtacaaagatgcaccatacagcagcatcaccccggcgtcccaataaaacgccagatcggcccgcccttttgcgagcagcacagatccgttcggattcatcagaacccttaatatcccgacgatggcgagaacgtttaaaaccgggacagccgccagccatttttctccgaataccgaagccacgaatgcatccgacactgaaaccaaaccgagcaaaagcggaaaggatatcagcgcgagtattttggtcatattgagaaatccttctctgataacgctgttttcatgcttgtttttcgcaaagacgggaaacgcgactctcgtaatgatcggattaatttttaataccggaagcgtgacaatctggtaggccagattgtaaatgccgagcgcctcggcgccgataaaactgccgatcagaatcatatcaatattcgctccgagccggttcacaagccgggaagacagctgaaaggccccgaaagaaaagaagcctttcattcctttcagatcaaaaaccaacgccggtctccatgtttttctgcaggacatccagtacagaatcccttttgacgattgcagcagcacctgggaaatcacataggcgagaatcgggtccgtataaaaaaccgcggccgccaaatacacgaaggacaacacatttgaaaagatttcaatcttgcttaacgtgttaaatgccagcgctttttgcagcatatactggtattgctgaccgatcggcgcgattaaaaacatgacggccagcacgcggattaaatagacaagctcctcccgccgataaaaatcggcgatgagcggactgctgaaaaacagcagcgcaaacagcgcaagccccgttatgatattcagccagtacaaggaagacatctgtttatcagtcacatgatctttttgaatgagcgcggcgccaaaacccatatcaagcgcgatttgggcaaacaccactaccgttgtgatcatgccgacaaggccgaattcagccagtgacatgacccgcccgagcagggcgaattggacgatttgaatgaccgtaatacacgctgtcgaaatacttgtccatttggcgccgctcaagatttgatttgtaatactaggcatcgttttccctacttttttgtctgctgaccagaatttttatcgcgccccgtcaccggtccagatcactttgcacgttttgagcataatcttcagttccaatgaaaaggtcaggttgcggatataatataagtcaaacatcagtttttccctcggtgtcatgtcatatcccccgttgacctgcgcccagccgcttaatcccggcttaacggccagccgctccgtaaaccccggaatctcagcctgaaactgttccgtaaacacgggacgctcgggacgcgggccgatcaggctcatttctccccgaagcacatttaccagctgcggcagctcatctatacgggtccttctgataaaagcgccgacctttgtcacgcggggatcctttttcagcgcccagaccgcccccgatttttcagcatctattttcatagagcggagcttatacaaataaaacggcttcccgtctttgcctacccgctcctgcttataaaaagccgggccgggcgactccaaacgaatcagtatggagaacaggcccatcaccgggagcgccgccaaaagccccgcaagcgcaaacacaatgtccatgaatcgcttaaaagccaaataacgggccgttctttccgtaacggcagcggaagtcccctgccgcactgcatagttattatttacattcatgcttttctctgctcccactgacacacacctcacgatttgttgggatgtttgatgacctatgccgtgagtttagcagatggatgttaattggaagtaaaggaagcgttaatgtttattagaatgtttcgattattgtttttttattgtaaatctattcatatccatatttgagacaaagcataatgaaaaataaaaaaacagaccggtatgaaccggtctgtttccatgaaaaaattatcggaaataggaggaaacgccttgggtgatccccgccgcgagtctgtcctttttcgttgattgttttaaaatattggcatcaatcgggcttgtgacaaaaccggtttctaacaagacactcggcattttagaatacttaatgacgtaaaatccggcagttttcacactgcggtcacgcgtgccgagagcagaaaccattctcggctgaatattttgggcaagcctcagactgtttgcggattggtacgttttatcataatacgtctccgtaccgtttgcactgctgttatcatttgcgttcgcatggacgctgatgaaaatatcggcgttcgccttcgcccctttgttcactctctcctcaagcgagtcaaaggtgtcgcccttcctcgacattacagtaagcgcgcccgcgccgtataattgattgttaagacgcgtagcgatatcaagatttacatttttctcaagcaagccgttgccggttgctcctgaatcctgatagccgtgccccggatcaataaagaccgttttgccgacaacgggatttttaagctgcgacgcggcattgttgcttaaagatgaagcacttcctatgacggtgaagctggtgatgtttttacttccgatatacgtccggacgtcttttgacagactgtctccattcgtcagcaggtgaactcttccctgtttggcgctcagcacgcctccgacgatggtatccgcctctttaaaaccattggtaacaaacgtatagcctgtgcttaagcctgtcttttttgcaagattcacagacaggttatagcggtttttgccgctgattcttgaagggttcggcagcttattataaagtgagctgctgatgctgcttgtcccgccaatgacaatcgtgtttttaatccctaagcttttgatcgcattggacgtagaaccatttaatgtcgaatcattagtgaataaaatcggatattttttagcggacgcataagaaatcgcagccattccatctgcatcaacaaacccgttgaccacaagggctgtagaagatcttgtcatttcacccgccacttttgcggctgtggcatatctcgtgctccctgataatcgtttgacactgatgcctaatttagcaatttgattttcagtatttttcgaaacggcaggtgtgccgcctacgataatcacatttttcgtttttaaatcaattaatcccttttttgtgccggcagacagctgatctttatttgtaaacagcagcggcgcatttttttgatatgaaagcggcgcagcggcaattgcatcggcatatgaagttccgccggtgataattaccgttttcgcttcaccccatgattgttttgccgccagtacagccgtatcataccgggtgcttccgccgatccttttaaccgtgttatcagccaaagcggaagggacaaatagaatgaccccgagaataaagacggggagacattttatgatgaatttcaatccgatctcctccacagaagtttagtagtttgtaagtgctgtattagggtaatagaacgcaagaatagaagtatacggctctccggcctccgctctttcttttgctccgtattgactcattcctacgccgtgaccgtatccttttcctgatatcgtgatttgcgaagaattaccggacgcactggcgtatgtgcttttaaaagatgaagctccgatcatcgtcctgagttcagacgctttcacctcaacagatgcagtcttgttcatgacatagcccttcgacttgtcattcacatggtacgtgaccttcaccgcggcgtcttccgcgcgctggccttttgtttttccggttagcgagagatcagagatgcttgcaatttttatggaacttgcattggtttctttatttttcatcagccaattttttattccgttgagctgcgcagcatttgcttcgtttgttttagaccaccaggatgcgggatttttcatatccagacccgctggcagctgctgcttctgcaatgttaaagaccagctgatttccggatcttttgtatcctttttggctactaaatacggcactttcgatccccacacttcatcgccggcttccatgtaaccgccattgcttgatgagtaagtggcatctatcaatctgccggaataagtgagcactttcccttttgttccgttaacggctgcggtggcgtttggataccagctgtatcccccgtaaacctgaaaggccgttgtatccgcgactgtttgtcccatcttgccgatagagtaggtgcgggcggcaacagcctgggctttcagcgcttctgtcggccagcttcccggcatttcattcggcaggacacctttcagataatcctcaaaaggaatgttttcattaacaggtcttacatatttgccggattccgcagtgaaactcatattccccagatatggcttcccgtcaatgctgattgtgtttgctgttgaatattttgcaggaaccgccttgaaagacgtttttccgctgttaatgcctgcaacgcctaatttgccgccggacgtttcaatacggtacgtctttccgtttacgagataaaactcttttgcgtaagcagccttaactgaatcggcaattgaattcgcgctgcctattaatgtataagaataggtgcctttcgttttaaaaaggctggcctcgtcggcgggtgtttcgctttttttgatgtatacaagcggcatgtgatttgcggcggcaatatttgatccgacaacgatgtccgctaatttagtcccgttggcagccaccgttttgcttgcatccatgccgagcgaagtgactgcgtttgctgatatttgatatctgtttgatccggtaattcttttggtgaccgaggccttctttttaatttgattctccacatctttgctgacgcttgaagtgcctcccatgatgatcacttttttaggcagattgtagctcggaagggagtcttttttcgtcaggagaattggatagccgttttgcgcagcataaggcgcgattgccagcgcatccgtatatacatcccccgttactacgaccgcctggtcatagctgcccatttcggccgcaatatttttggacagatcatatctgttttttccgctgatccgtttcgtgcggccgtatttcttcaatgtcttttccgcggccgacgaaatactgttcgtcccgccgatgattaaaatattatccggactgaatttcttgatttgcgcttctgtgctgctgctcagttttttcgcttcagtcagcagaacaggcgctttcagtttattcgctaaaggaatgacggaaagcgtgtccgcaaaataagcatccgtattaacgacaactatgttggacgggtttttccaatacttggatgtcgcggcgttagccgtatcatatttggacgcgcctcccaatctggcaacggaggagacatcgcttcccgtcagtttataagttcctgaaggttcgatattcagagtcgatttattaccaatataattcgtcagttttactgagatatcagaactggacgcaaaagtgctttccggtaataaagccaggctgaatatcacagaaaaacagacagcccatattgttttcttcaatttttatcccgccttttgctgatcatggtgtattattttgctttctcgatttccttgatctctttttggcctttatcatttgtgaaatacgtaatgctgactttgtcattttcgctgaatttattcagaacatcagagaagtcatcagaaaattcaaagctgacgggctgatcatccacttttacttcaattgtgtgcgtatccgccataccgacataatatgccgtttctttttgagcctggttctccgaagaaccgcttcccttctttgattgatccgccgttccgcacgctgccaatacaacagaaaaaagcagtattaagaacgaagctgcaatagtttttttcatttttttcacctcatctttatgtatcgtcttatactaacttttttttaaggtaattttaaggtctttttgtaacctttttttaagaatttcgtctattacatggttataagtaaaaatatgactgggtttataaagattagtaaattgtatcaggaaagttaatagaaaaggtgatgacaaatgagagctgaacgaaaaagaaagaagaaaaaagttcttctgacaatcgtaacaatcatcgggctgttagttttatcatcaggaggctacgtctactacttgtggcacaaagcggcttcaacggtggcaagcattcaggaagacttgaaaaaatcggacaaacgtgacacggatatagatctcggaaagaaggatccgatttctgttttaatcatgggcgtcgatgagcggaaaaatgacaaggggcgcgcggatacgatgatttatatgaccgtcaatcctaaaacgaatacaacagaaatggtcagcattccgcgtgatacgtatacgaaaatctccggcaaaggtacgatggataaaatcaaccactcctatgctttcggcggaacgcagatggccgcggataccgtcgaggacctgcttgacgtgccggtagattattttgtgaaagtaaacatggagagcttcaaagataccgtggatacactcggcgggattacggtgaacagcacgtttgccttcaactacgacgggcactctttcggaacggggaacatcagcctgaacggcgaagaagcacttgcctacacgcgtatgagaaaagaagatcccaggggggatttcggcaggcagcagcgccagcgccaagtgattgaagggattatttctaaaggggcaaacatctcgtctgtcacgaaattcggagatatgtttaaggtcattgaaaacaatatgaaaacaaacatgtcattcgatgatatgtggacggttatgactgactataaaaacgcccgcagcaaagtcactcagcatgaactgaagggaacgggaacgagaatcaacaatatctattattacaaattagatgaagcaagcctcgcttcagtcaaaaaagaattaaaagaaagcctgaaataataaaaaaactctgcatatgatgcagagtttttttattctgtaaaaggctgcggacgggtttttctatagccgtaccgataaagcagttcttccacaatccgttttgaagccgatccgtcaccataagggtttgacgcctttgacatccgttcatattcagcctgatcggttaagagctgttttgtcagctgatacaccgtttcttcatctgtacccgccagctttaatgtcccggctttcactccttcggggcgctcggttgtgtccctaagcaccaagaccggctttccgagagaaggcgcttcctcctgaaccccgcctgagtcggtcaaaatgaagtttgctttcgcagcgaagttatgaaaatccacgacctccagaggttctattaagtgcaccctgtccgaatcagcaaaatgggcttctgcggcctcacgaactgcgggattcaaatgaacgggataaacgacttgtacgtcctcaaactcttcaacgactcttctgacggccttaaacatctgttccatcggcctgcctaaattttcacgtctgtgcgctgttaaaagaatcatcctgcttccttccagcttgtcaaaaatcggatgaaaataatcttcccgcactgtcgtttgaagcgcgtctatcgccgtatttcccgtgacaaatatagaatccggctttttattttctgaaagcagattctgctcggcctggcttgtcggcgcaaaattcacatcagcgatcacgcccgtcatctgccgattgatttcctcggggaaaggagagtatttattatgcgtacgcagaccggcttccacatggccgacagcgatttgatggtaaaaggcggcaaggcttccggcgaacgttgtcgtcgtatctccgtggaccaaaacgatatctggttttacttcttggaacagcttgtccagtttcagcaaagcatgagatgtaatttctgaaagcgtttgacgctctttcataatattcaaatcaaaatcaggcgtaatgctgaatgcttcaagcacttgatccagcatctgtctgtgctgtgcggttacagtcaccagcgaatcaatttcctgatatttttcaagctctaatacaagcggagccattttaattgcttcaggtcttgtaccgaatacggtcattacttttagttttttcaacggtttgtctgcacctcgttttatatgtcggatatcccttcatgttaacatatttatgccgtttcttagatattgtaaagcttaatggcaaacaaagcaaaaaccgttccaagactctttgaaagcggattaaaaggtgtgaattttaatcaattgtggtaaagtggaaaaagactaggttatagttctgaaaaaaagattttgcagaaacaaggatggtgttattcagtgaagaaagtacgcaaagccattattccggcagcaggtttaggcactcgttttttgccggccacaaaagcaatgcctaaagaaatgcttccaatcgttgataagccgacaattcagtatattatcgaagaagctgtcgaatccggcatcgaagatattattatcgtaaccggaaaaggaaaaagagcaatagaagaccatttcgacaatgcccctgaactggaacgtaatttagaagaaaaagggaaaatcgaactgcttcaaaaagtgaaaaaatcgtcaaatattgcggatatccactatattcgccaaaaagagccaaaaggactcggtcatgccgtttggtgcgcacgcaacttcatcggcgatgaacctttcgccgttcttctcggcgatgatattgtccaggctgaaaaaccgggacttcgtcagctgatggatgaatacgaaaaaacattgtcttcaatcattggtgttcagcaagttcctgaaaacgacacacaccgctacggaattatcgatccgttaacaaatgaaggccgccgttaccaggtcaaaaattttgtagagaagcctgaaccgggtacagctccttccaacttggctattttaggaagatacgttttcactcctgaaattttcatgtacctggaacagcaggaagtcggtgcaggaggagaaattcaattaacggacgccatccaaaagctcaatgacattcagcgtgtcttcgcttatgatttcgaaggaaaacgttacgatgtcggtgaaaaactcggatttatcgagacgacgcttgaatttgccttacaggatcaggatatccgccataaattaattccgttcatgaaggatcttcttgaaaaagaagaagctgacgaatagaaaaagctgccgaatccggcagcttttttatgtgatctttactttttagacgttacggtcagtgtttgatcagcattgttcacagaaaaagtatattcctggtttttaagcatgagcaaattctgattgattttgctgccgcctttttcacttaaagctgggatgtctgcgggacgcgataaatgaaaaaccacttcggagactgtatccttgtcaatcactacatccgttttttcatcggatgtttttaatacgttccgtccgtcagccgtttgtccggcagctggatttttcaatttactctgtacatcgtcccggcttttattgagatatgagagaaactcttctgctgtttggcttgataaactgccgctgaaatcattaagctgaacatccgtcttttttaaagcgttcactttatacagatcagactttttcataaagtactctttatcgtttaatttcactttggccgcctggttattttcggcttctacctgcaccttcgtgccgaaacttacacttgcggaggcttttccttttatatctttttcagtataaaggtccgccttttcagcttttaccaaagcaggtttattcacagactcataaaggccggcatcgctctgtttgacgtcaccgaaagatgtaatcgcacgcagaggcttgtctgaaaacatcgaagcgcccgcgccgacagccagcaatgcaagcagcgtaatctgaatcgtattggcaatgaatttaggcttcgctttcttttgctgcgcctgactgattttctgttcctcggctgcccgcgttctgccttcaatctgctcgttttgatatttcttcttttctttctttgaaagcttgttgaaccaatccacaaaagctttatattctttcacaacggctttcgtttcgtcgaacatgcgcatttcgccgtaatgcatccaagccacccgatcacacattttctcaatctgtccgatggaatgactgacgaaaaagatcgttttgccgcgttctttaaattccgtaatgcggtccacacatttctgatagaaagtctggtcccctactgagagcgcctcatcaataataaggatgtcaggatccatatgcgccgatatggcaaaaccgagacgggatttcataccgcttgaatagcttttaacaggctgatctataaagtcgccgatatccgcgaattcaacgattttttcataaagctcgtctatctgccgattgttgagacccatcatcaagcattttaaacgaatgttgtctttaccgcttaattgattgtttaatccggcagaaatcgcgattaaagacggctgcccgttcatatcaatctccccgcttgtcggcggaatgatctttgcaagcaaattggacatcgttgattttcccgagccgttgatccctacgaatccgatcgtttccccttcatagacgtcaaaagaaacatttcggacagcgaaaaaacctttttgatttctgtttgggaaaaacagtcctttaattttgtcagactgttttttatatagaaaatactgttttgaaacatttctgaacgaaacttttagtttcatcgtataatctccttactatattaaagaaagtcaacaaacttatctctgaatttcatatgaagaagtgaaccgactgttaataacagcagtgtgacgaaccagaaatacagcgtgtatttcacatcgtggaaaaaccactgcccttccataaagctgtctctaaagccctcgataatatagaaaagagggtttaacttcaagatggtcaaaacttcaggtctgtttccgaatttctccgcaatgtcccagaaaatcggcagaagaaaaaagagcagccttgtgacggcttgaagcaaaaactgatagtccctgattaaaacgctgatggttgaattaaacaggccgaaagcaaacataaaactgatcatgcaaaacaagtaataaatatattgcagccagtgaagcgtcggaaacagtccgttgctcagcagcacaataatataaatcgccatcatcacaaagtaactgaataaattcgatgctatcactacagaaggcagtgaactgatcggaaagttcattttcgacactaaatttatccgtttaaaaacgctgttagatgcatccagtatcgtcggactgataaagaaccaaggaattaagccggccagcatccagacgatgaacggtacgctgtctccatttccaagcaccatatcatgtccgccgcgaatcccgagaccaaatacgaaccagtaagccagcatttgaatcatagggttgagaaactgccacaatatacccaaatagttcacttgatactttgatttcgtttcgtacactgcaagccgcataatcagcggaaatgagttgaattgctctttcagaatttttaccaatgcattcattctaatcttccttagtcgtaagttttaggtaatagctttgacttacaaaagcaccgctcataattgtaacagattacgatgtatttttcacttcataacaagcctgaatcccatgagcgcaacatgccgtcacttaagcaaaaaagcataattaacgtggttaaattatgcttttttgcacctatttacttgtccccgaaaatcacttttacggctttttcagacgattctccggtttctaaataacagaacttctcgtaaaaaggcccgaatgaatccggaagcttataatcatctgattccgtttcattgacccatttgataacgtcacctgtttctttgacaagcgggccgggcgcttctttttcaaagtcaaagtaaaaccctctgagtttatcccggtacgtttcgatatcaggcacataaaacagcatcggtcttttcagatttgcatagtcaaaaaagacagaggaatagtccgttatgagtaaatcagagaccatatacagctcacggatatcttcgtagctggagaaatcataagcaaatccttcatacggtccgagatcaaagttttccgccacgagataatgcattcgtaaaataatgacataacgatcgccaatcgcttctctcaattgatgaaggtctaaatcaaggtcaaacttgtattttcccttcttataaaattggtcatcccgccatgtcggtgcgtagataatcacttttttatcttgcggaagattcattttttctttcagcgctttgatgacagaagggctgttatccgtttgaaggaagtcattccgcggatatcccgattcaatcatggttttattaaactgaaacgcccgggcgaatatttcggttgaatatgcgttcggtgaaatcaggtaatcccactttgaagcctctgtcgtaaagttgcgcttgtatttttcagtgtttgttccgggcatatgcacttcatccatatctacggcaaggcgctttaaaggcgtgccatgccatgtctggacatatgtcgtatgctcaggtttcggaatccacagcggcatacggctgttgacaacccagtactcggctcttgccatggcaaacagccatttgaacgtaaagcgttcgatataaggaattcctttatctttaaatgtctgtgagtaagcgggatttacactccagcagagacggtattccggcatctctttgctcatgtattcataaatcgcccgcggattgcagctgtactgttttccggcaaagctttcaaacatgacaaatttctgtttgacaggcagtttccccgcaaccctgaatcccgctttataagtgttttgtattcttttctcaatgaactttttcagcttattctttctcttgcgtacaaaggaagcgccccgtttcagctttcctttcacaaaatactccacgcgggtgctgaagctgtaatcgttcattctcaggtggagatttttcgttttctttttcgtgaaaacgtgaaatctggcaggccctttctccgttttcaggatcgtgaattggttagggtttacttgttcagatttcagaacctttaacggtttgctgttggtgataatctcttcacccgtcccggcatcttcaaaaatgaattgaatatggaattgaaagattagctgctgattcaattctttataaacggcattcaaatcaatttttgtatcaaagcctatcgtgtcaagcatcgttgtgtcctgaacatattcatcaaggtcgtgtctcggcacgtcgtgaagcggatacttcagaatgagaggctcctcttcttttccttttttcattttcagaatcaggtttttttcttttatctttaaggtttctgccgcattcagccggaatgcaaaacctttcagatgtaagctgccgtcagattcgagctccatttcatcaatccgcgtgacgaactttttctgcagcagctttaaggagaaattccctttcttcgtcgtgtaagggaaaaagaacatatgatgagcctcatctttataagaagacagttcaataggttcaaggctggattttaaccgttttttactgatatcactgtcatcattgataaaggagacatagaaatccagacatcctttgccgtccgtatggtcagaaagcagatccgtgctcataacagcatggtactccccgccttctccggccaaccgtttcagagggacggaaagttccgcttttgtcttacgatttataatctgaagagaaggctcttcccctgcagtgacattttcacaggatatcgtaatgctgaatgtctcttcctttatgttaagatgttttaacttgtatctgacaggattttctatacccataaaataagtctactcctctgtttcaattaaacatatccaatcacaatcatcattttgttactttcagcgaaaggttctccttcaccgtccggtagaattgatattgcagtccgttcgcttctgcggtcaccttttcaccgtcgtctctgtttaacatgacacgttcataatcgttataaatgacatacataatataaccgccaagtccgactttttcaatgtcacgtaacgggatttcaaggacgtaccgcccgtctcccagtgactgaaccggaaactggtggtgtactttcatgttatctctgtgctgaaacagaatatattgggcattatttctgtcctgtccgaacaagcggaacgtaacggtgaatttatgatcggcgaacaccgcgctttccgtttctccgtgcatgcgaagttcgaccagtttattttcttcatccgtcagcgggctttctaaataagccagtccgccttgcgtcacgatggttttatcgggctcttttttggaccagcggaacagcttttcgacctcatcataccgtttttgagtcagcagacggaaggctgtcttatgaatcggatgaaaaaatgtctcggaaatatcgtatttcgtcttctttaacacattcagaatttcattgaatttattgtagtaggcttctttgttttcgcttttcaggaagtgcatccgatcgaaaagacgcgtaatggaatcgaattcgatcaggcggttcatcgccatcttctctttttcagtatctaattttttgttcagaatatacttcattacggctatgttcgtgtcggttttttccattatattagtctgctttgtcagcgactcattattgtccattctgttcagataatagaccggttcggttgacgttgaaatatctccgcacgccaaaagaacatccataaaaaattgcttatcttcagcaaatttcatttccggatatctgatatcattatcttttagaaattgtaagttcatcattcttgcccgcgggccgagatgatagaaaatatgccggattgaaaaaggcgataccttcgctctgttcagagaagactcatgtttcccgatcgttttttgaccgttcacctgcatttcgatcgtttttccgaccgcataatttacctgatctctttcaagcatgtcgaataagattttaactccgttcggcgcaaaccaatcatccgcatccaaaaatgtaatgtactttgcatttgccagctcaattcccaagtttctcggataagccggggtccccgtgttgtctttcaaaaagacgactgtaatattttcatacaactcggcgtactcagtcaggatgtttctggaatcatcagtagagcaatcatcgacaagaattaaagaaatatgctgaaagccgatgttttgaaggatcactgaatcaactgttttccttacatattcttctgcattataaacaggaacgactaccgctaccttcttctcttccgccaatgcttctttgtttaaaatggtatattcgcgttcttctacggacggcttggactcttttttattcaacttaaaaaagttactaagattcatctttaaattctcctcttattgtctagctttttttcaaaagcgcataacaaatatagcgaaaataaccttatattacaagaagtactccctatccggagggagtacttctttatcatctgtatatccgaatgtttcaattacaccccggcaatttcttttttaatctgtgtggtggaaatgccttcggttctagggaggtagatgacttcgcattgatctttaaggaaatcgaatttgccttcccaatcgtctcccattacgaacacgtcgatgttgtgatccgctacgtcacgtactttttgatcccagctgttttccggaatgacttcgtcgacataacggatcgtttccagaatcagctttctgtgttcatagctgtggtaggcctttttttgtttttgcaggttgaactcgtctgttgagatggcaacaacaaggtaatctccaagctgctttgcgcgctcaagcagtttaatatgaccccaatgcagtaaatcaaacgtaccgtaagtaatgaccttcttcatgaaacaaaagctcctttctatcatcatacgtataacaagcaactgctctgaaatgctgcgcagctgtatccttaatcactaaagtgccaatttcgtactcatggaacctcattatatcacatagccctgaaaaggttaagccaatgtaaaacgaagttaaaatccacttattaacaaatgttattacaataggagtttagcagggtttttgcgcgtatgattaaagaaattgttatcttatttatatttttgtaaaactattgttaagtttatctgaaggtattatgttaaaataaagcttagcctaagtcacgaaaaagtgaaagaaaatcccgtacaaaaaggaggacggcagatgcagactgaaatggtgcacaacctttcttacgttaatggaaatttacaggagtttatttcatatttagacacttattatatcgcacaaaagcaaggagccgtcattgcgacggtcaatcctgagatcggatacgctgcggcgaaagacaaaggttatcatcaagtcatttcttccgcggatttcgtcctgccggatggtatcggcgtcgtgttaatgtcacgtttgacgcagcacccgctgaaatcaagaattgcgggattcgatgtgtttcttgcgctgctcggcctcgcaaaccggcagtctaaaaaaatatttttatacggagctaagcaagacgtgcttgacgccgttttgaaccggatcagcaaagagtatccgaatattgaggttgtcggagccagcaacggttatgaagcggataaacgcttcgtcgccaaacagatttcccgggcgaaacccgatctcgtgtttgtcgccttaggatatccccatcaggaacaatttatttatgaatacaaacatcttttccctcaggctgtatcgatcggtttgggcggaagctttgatgtgttcagcggaacggtgaaacgcgcccctgaatggatgatcaaaacgaatctggaatggctgtacagactggtgacgaatccgtggagatggaaaaggatgctgaacattccgaagtatgcttttaccgttttgagaaataataaatcaaataaaagcctgtattccaagcaggccgaagatcaaacgaaacagctttaaacaaataaaacagcaaaagagattggtaatctatgaacttgcgatctttattcgccgctttttattctatatatctgtctgttctcggcgttttgttcaagcctgtaaagcccaagaaccatctgaccctgctggtatcttttgaagagaatgcgcaggctctcatccgttcttacaaagcgcacgctgaatcgctttcttatgaaatgacggttttgtatacgagacacgccgtcagtctgaaaaaagagctggaaggtatcggctctttttatctgaacgaaaaacatccgctgcatcttttgaaggctgttttgatcctttttaagagcaaagtggtgataacggataactatttcctcatgacaagcgtcttaaaccgccggccgcaaacgacatgcattcaggtgtggcatgcgaacggctctttgaaaaagttcggccttgaggatgtgacgaatcaaaaccgcccggcatcagatatcagccggtttaaaaaagtgtaccgatcgtttgactttgtcaccgtcggttcagacgcgatggctgacgtttttaaaaagtcgttcggcatacgggacggccagctgttaaaaacgggtatccccctgactgacgtctattatgaagaacacaagccggaactgaagctcaaatggccgaaaaaaatcatcctgtacgcaccgacattcagggattatgatatgcagtcctttcggctgccattcaccgaagaacagctcacaaacgcgttaaacggagagtatatgctgcttgtaaagcttcaccctgccgttttgcatcagatttcggcttcgtttgaaagcgaattgatcaagaacgtgtctgacatgcgtcttcatgatctcttgaaagcggctgatattttaattacggattactcttccgtgccttttgaattcgcgctcttaaataaaccgattttctttttcacgtatgatctggaggaatatgatcgaaaacgcggtttaatcgacaattatacttccgtcattcccggaaaggcttgtcatgacagcgaagctcttctggaggaaatgacgaaaaagccatttcgtgcagaagaaatgaagcggttctcggacaaatggaatatgtattcagatgggaattcgagtgaagcgttattgaaatttgcggaaacaaaaatgaaaaattgtgctgaagcacctgcctgaatccgacggcgggtgttttttgcatgaagaaagggctgaagcatacacttcagccctttttttatactttcataaacacgggaacatcatagtaaagcgtatagtcatccagcagtgagtataagctgtacatgcggtttacctgcttatacgcccagccgatatctgtcgcatactgatgggccgcggctggagaccatctcattttatacagcgtatcctgctcgtatgaaggattgtgaatataagacgcaccgataaattgggctccgccgataatcgcggcttccggagtaaaccagccttgattatacgcgtattgtgcgccgtagtaattcgggttgctgtcataagccccgatgccgtacatgttgtaaacctttttaccattatacataatgccgttcgcaagctctgacgtgccattgccagtttcaagcaaagcatgcgaaatcaaatacacttcattgatgctgtatttgccggcggctgtaataaaggcctggcctttccctgtcagtattcctttattgaccagcactttttgattcagttccgatgcgttcagtccggctgtctgagagagcttcagaaattgaaagtaatacttgctgtcttgtgcgaagtgagccggattgacatactgcccgacttcgtcactgctggcgtttctccagcccatgctgagtttggcccagccgtttgtctggcctgtgatgctgactttatcgccttttttcaactgcccgataatattgccggagctgacttccggggttgaccggacgttcaggacgtcggctgtgaccgttccggaggccgtattgatgtacgtaagcgatgcataagccgcggcatcagtctgcgggctgactgtcatttgttttttgaccatatctgccagcgagatgttgtaattggtattcatgatttgcggtccgttttttattttcaaaatagccatcgtccatccgtacagctttttcagcttttgggaggcggcgtccgctgactgcgctcccgtgaattgatcgcgaatgcggagttcataaaccggatggctttcactcgtatagccggcctgtaattgtttggcgctgaaaaagctcatgcttttatttaaaacggttttactgctgaatgtatcggttttgatgacgtactgtgcagagccggttttccccgtctccttcacagtgccggccgctttgttttgcttgaaaaaagcagtcacgcggtcaatgtcttcctttttaagcagcggtgccgtttcaattctgaattgtgtatacgctgcttcacctgttttctgtgcggaggcggatacttttttccctttgaaaaagtccagcgaacgattgatctttgccttatcaagcagtgattcggttgtgacttggtacgttgtgtccgtctgcttggatatcgtttttgaaatagcagtcagtttatatcccgccagcagattcaatcctttttttatcttcgactggtctgccgtctgctgagaaagcagctgatattcgttttctgctgtttttcccgccgctgttcttgccgtctttacatgctgctggcggaaaaacgcctccgcttgatctgcctttgcagcggtaagctgccctgccgtgatccgataaacggacactgatgctgtctttttgacaggcgatgcgtcgcaatgccattttttctttttaaagaaagcttgaacactttgcagctgcttagccgtcagtccgctcatcccgaccgtgtaattatttttcttgccggctttttgatagcttccgctcacacccgtattcttcttgatttgggtgatagcattttgtacggcccctactccgttaaaatatcctgactgcacgttgtacacggttgctgttttgctttgggcatacttttgaacattccctttgacgccagttttctgctgcagctgtttcgctaaacctgccgcatcatttgcatttgaaatgtcagaggctgtcacggtgatattcggactggcctttgccgtgactttcagcgacgcctgcaatcctgtttccttttgaaaatcagtttggatttgagcggctttttgatcgccggagattgttcctgattggatctgaaaccgggctgtttcccgtttgatctgacggtatgacgctctcacgcccgtctgcttcgtcaacgcttgcgagagcgcttttgcgtccgcttcggccgccatctcagcagtcacgacctgcatgtacggctgttttgtccccgccggcttgacggcgccggtcacgcccgtttttttcgtcagttcggcaagaagatttttcgtctgccgctcgtctgataggacgcctgatgtgacggtcacgtacggctgtttgcttccgcttgcgctgtaagtgccggacacgcccgtctgcttcgtaaaatctttcagcacggttttcgcatccgtttcatcgtgtaagcctgaagctgagatttgataagtgagcggcgtatttccggctttctttgcgtcagcctgccaccccgtatcctttttcaatttcgctgccgcttgaagcgcctcgttctcagaagcaaattgctgcttcgtttccagctcgtaaacggagtagtcgctgtatgcggcctcagcgggctgtgtaagggtgcaaaagacaaggaaaacggcggacaataacataggtgcaacgaatctctttttcattccttctcctctttctgattcaattggtttctatcaaactagtttatttatcggccggccttcttcatttttacagagagaaatcacccaattttccaaataaaaaaaacttaatcccagagctgggattaagtttggttttatatatgagaaacgatgatcgtgcaatctccgtttatcgtaaagtcaggcatctgatccggcagtatgaaatgcgcgcctttttcaagcttggcggacttgccttcacagaggatggagccgcttccttctgtgacgctgcacagcataaacggagcgtcctgggtcatttccgccgtcccgctgatatcccatttgtatacagaaaaatattctccctgcacaaaggttttgatggtgacgccttttctcgtttcagttgattcatctaaaaatccgtccacatgaggaacggtggcggcgttgacggcatcgcggatatgcagctcacgcgcctggccggtttgatctgtacgcccgtaatcatatatccggtaggcggcctctgaattctgctgtgtttcaagcacgagcgcccccgcgcaaatggcatggatggttccgctcggcacataataaaaatcgccgggtttgatcttcacacggcgcagcaggccttcccagtcaccgctgttaatcatggtgacaagttccgctttcgaacgggccgtgtgaccgtatatgatttccgcattttctttacagtcaataatgtaccagcactcagatttccccgtttcgcccagtccatgctcctcagcgtcataatcgtcaggatggactttaacggacagatgttgtttgacgtccagtattttcgtcagcagcggaaaccggtccccttccgttccgccgaataattctctatgctgatcccacagttccatcaaggttttcccttgatacggaccgcttttgaccgtgctcattccgtgcggatgggctgatatcgcccagcattcgccggttgtttctgaaggtatgtcatatccgaatcgttcgcgtaataacgtgccgccccatagtttttctttacatacaggctgtaaaaaaatcggctcttgcgtcatgttcgttcccctccccttaaaaagcggctcatatcccattccccctgtgtcttttttaaaacacggagggagccgcggttaaaaacaatatgtataaaatggctgacctgctcattataccattcggatggggcggaatgctcagtcatttcctattccagaataaaatgccttgtttgtcgcaaattaaaataactgatggaaaggggggaacattgtgacgatacatgcggagctcagcaaaaaccttgaagtgctgaaaaaacggttcggccaaagcgatgacatgatgttttattcgtttacgtacggaaacggcaaatgtgacgcctgtcttatctatatagacggactgaccgacaatcaattgcttgcggaatatattatttcgcccgtgcaggcggccgcccggcatcaagaggaaccggctgaaataccgccgtcatccatctctttcggctatcgtcatacccggctttcttcacttaaggacgcggaggcagacattttctccggcaaatcggttttgctggcggagggatggggggaagccctttcgtttgagacggaaacatttaaaatgcgtgatattgaagaaccgtcttctgaagtgcttgaacgggggccgaggataggttttgtcgaaaagcttcggacgaacacggcgcttttgcgcgagcagtccggtgatcccaacctccagatcaaagagatcacactcggcgaacggacaaaaaagcggatcgccgttgcctacattcgggatatcgcgcctgatgatgtcgtaaaagaagtgatgaaaagactggagtccatcaccattgacgacatcccggaatcaggagcgatcgagcagcttattgaagataacacgtattccattttcccgaccgtcttgacgactgaacggcctgaccgggttatgggcgctcttttggagggaagggtttccattcttgtagacggaacgccttttacccttttggtgccggctaccgttgatgaatttatccactcccctgacgattataatcagcggtgggttccggttacctttctcaggctgcttcggtatacatgcattttaatcacgatttatttacccggcctttacatatcgctcgttacgtttcacacggggcttttgccgacgagaatggcggttacgattgccggaagcagattgaatgttccgttccccccttttgttgaagcgttcatcatgatttttacgatcgagatgatcagagaagccggactcaggctgccgaagccgatcggacagacgatcggcctgatcgggggcgtggtgatcggacaggccgccgttcaggcgaatattgtcagtgcgatgatggtcattgtcgtatccgttacggcgttggcttcttttacggcgccctcctatgcgttcaattttccgctgaggctcatccgtattttttcgatgattttgtcggcgatattaggtttatacggactgatcatgtgctatctgcttgtcatcggccatctgatgcgtctgaaaagcttcggtcaggactatcttattccgatcatggcgcagcctggccaggacttaaaggatacgatcgtcagactgccgacgcctcttttgaaaaaacggccgaccagaaaagagacgaaagataaaatcaagcaaaggtgatccccatgaaaaaaccggaagacaagctgtcgtttatgcagacacttctcatggtaagcggaacaatgatcggagcgggcgtgttaacactgccgcgctccgccgcaacagcggacagtccgagcggatggatcattattcttgtgcagagtgtcgtgtttatcggcatcgtcctgctctttatgccgtttttgcagaaaaacagcggggaaaccatttatgagctgaatcaaagcatcatgggccgcgccatcggttctcttctgaatttattcatcagctgttattttgtcgtcaccgtctgttttcaagcccgttttctcggtgaagtcatcaattactttttactgaaaaatacgccgatgggtgtcgtcatattcatctttctggcggtcggcatttaccatgtgaccggcggggtctatcccatttcaaagctttatgcctatctgtttccgattgcgatcgtcattctgattacgctgctcatattcagtttgagactgtttaagctggatttcgtccgcccggtcatggaaggaggctacaaaagcttttttgagctgtttccgcggacccttctgtatttttcgggacttgaggtgattctttatctggtgccgtttatgaaaaacccgaagcaggcgaaaaaggcggctgtcttcggcatcgcaggcgcgaccattttttacagctttacgctgcttgtcgtcatcggctgtatgtcggtcgctgaagccaaaacggtgacgtatccgaccatttccctgattcatgccttggaaatccggggcattttcatagagcggtttgatatctttcttttaattacgtggacatgccagcagttcacctgtatgctcggttcttttaaaggggcgcatctcggattaaacaccattttcaaactgaaaaataaaaacaatgcctggctgctgggaggcttattggcagtgacattcggcctttcaatgtaccccgatgatatcaacagtgtgtttgcattcgcgaatattctcggatatgcgttttttgccgtcattatgattccttttctcatctggtttgtcagctggatgaaaaaaatagccgggaggaaacagacgtcatgacacttttcataaaatgggcggcggcgcttttcatactgatgacgctttcaggatgctgggacgcgaaggaagtcgaaaagctgtctttcgcccgggggctggcgatagacgagacgagtgaccgccgatataaattaacctatcaaaacctgctgccccaaagcgaaaacagccaggcttccggccggcccgtgtttgtcaatgtgacgacgcggggggataccattcttgaagccgtcagtgaagtctctttaaaagatccgcctgtttacagcgatcatttaaaagtgctgatattcagcgacaaattgctggccgaccaaaatatactgcagatgatgaatcattttatccgcgatgatgaattaaggcggagcagctacctcttcgcggcaagaggaaaagcgtccgatattctgacggagccgacgccgaatcagcagcagcccatggccgcggaaaagctgatcgaccttacgaacaacggcggctacaacgggaagattttaaaaccgctccgaatcgggagagcttcgatttactgccataataaactcagttttctcattcaggccgtcagcaatcaaaaaggaaaaacggtgtatgacggagcggccattatcaaaaacgcaaaacaaaacagattggcgggatttctgtcatcatacgaaatacagagcctgaattggctgatggggacgatacggggcggcgtgctgcccgctttggataaaggggggcacccgattaccttcgagatcaaaaaatcaacatccgccatcactcccaggctgaaaaacgggaagctgtcatttcatgtagcggtaaaaacaaaaggacttttgtcagaggatcaatatgccggagaagattcattcgatcagcactatttaaacgggctggaaaagatttttgaaaaaaaactgaaaagcgatgtgaaagaagtcatcgataagctgcagaatcaatatgaaacggacccggtattcttttctgacagagtccgcattcaatatcccgactattggaagaaagtaaagcatcattgggatgagaccttctccgaagcggcttttgactatgatgtttccattcagattaccaacttcggaacgatgggacggtagccttcagcctgttttttcgacacggaggagaatctgataaatccggctttgttcgggcagctgtgtcaccggaaattgcatcgattgcgccattcgtgtgatttcctgtaaaaacagctgcacccgctcatccacgtgaacatacgtataggactgctttttcacagcaaatgtctcttccggaaagagcgtgcgcaccgtctgcggcgtaaaaaaccgcaagtgggtgcggtcgagaatgccggcgtctctgtatgtccagtcaccgagcagaagcggaaacagcgcttcggcgtgggaaatattcggaatgctgcaaacgattgatccggcaggcgacaaataggatgagtacgtttcaatgacgcgccacgggtcttttaagtgctcaaggatgtccgcgaaaatgatgcaatcaaaaaagccttccggataaggcagcttcacttcttcgacatcttcctgcagcaccgcttcatagtgtccttttgccgcttgcgccgccagcgggtgcagttctattccgtacagttcgcaaggctgtctgttttgaagttccagccccgtagctcccgcaccgcagccgacatcaagtatccgtttcgcctcccggggaacgagctccgcaatttccggtctcggatgagtaaagtacgtgaaatcagtgccccatttttccgtaaaacgctggcggttctccgaatataactgattgatattgatatcctgattagccgtaaacgtcgcgtgcccgtggtgatgcacaaaggcatcgagggcgatgtgcaggctgtagcctttttgcagggcgcgcagacataggtcatcatcttcaaaagaaccgtatccgaattgttcatcgaacgggccgatgtcttcaatgacgcttcttttcaccagaagacagaagccgacaaggcgtagcacccgctttgtatgatgcttttcccgttcgcaatacgcctccgcgaatgactccagttcatcaagcgattgatatgcgtcatggatcatttgcgcgccgctgacatagttgctgacgggcccgaccataccggttttttcagattgatacagcaccctcagcatggaggtgagccaatttttcgtgaccatcgtatcgttgttcagaaacagcagattttctccccctgccgcttcgattccctggttgcaccccttggcgaacccgaggtttttttcatttaggatgactttgacgtcaggcagatttgatatgtattctctcgttccgtctgaggaaccgttgtcaactataatcagttcaatcttatctttgtcggtgtatcgttcaatgctggccagacattttttcgtcagctcaagttcattatatgtaaggataataatactcgttttcaccggcatccccgcctttatcgtgactttatacaacgtatgacatatccccgtcatttatgtgaccgggcgcccgcacggcatccgttttgaggggccggtgaataaccgccccctaaaactgaatattacggatgaactgtccgccgatttgattctgatcccgagcctccgttacggcttttcagatcctgctcaatttcttcaaggcttttccccttcgtctcggtcactttaaaccggacgaacaggaatgccagtatcccgatcgcggcataaatgagaaataaatagctgatgccgactgcttccattaacatcggataggttaatgagacaatcaatgttccggcatgcagcatcaaagtggagacacccgtcccgataccccggacatgcagcgggaataattcaggaagcatgacccacacggcaggcccccagctgaccgcaaatacaacgataaacaggcctaaacaaatcaccgttgtccatgatgcggctgctgaatgttcaaagaaaagattgaccgcggccaatacgagcagactgatgaccatgcccgcattaccggccagcagcagcggcttccggccgatcttatcaatgactttaatagccgcaagcgtcatgatgacattgacggcgccgattccgaccgttcccaatatagacgcggaattgccgaaccccacactggtaaatgttttcggggcgtaataaataattgtatttgtcccgatgaattgctgcaaaaaggcaagtccgaggccggcaatcagcgcgggtctcacccacggctcaaacaattctttcaagccgccttcgttttccttttccgcttctttcatctgatcaatctcatcatcaatattcttcgttccccgcaatgatgaaaggatttctcttgctttctcttctttgccgatcgtaaacagccagcgcgggctttccggcataaataggattccgatcagcagaatgactgacggcacaaccgcaagtccaagcatccagcgccaagcgcctgcatcggcaaatatatagttcacgatataagaaacgaggattccgaccgtaatcatcagctgattcagcgaagaaagcgccccccgtttatgcttcggagccagctccgataaatagagcggaacgatcgttgtagatgttccgacagccagtccgagaatgatccggaaaagaaccatcacctctgtattcggggcaaaagcgactcctaaaccgcctatacaaaacagaagcgccgctcccatgatggccttccgcctgccgaaccggtcggtcagtttgccggcgaatcccgatccgagaatcgcccccgccaataacgaactgacgacgaggccttctgtaaaggcgttcagtcccagttcttttttcataaataaaatagctccggaaatgactccggtatcatatccgtataacgcgccgccgagtgcgccgaaaaaatagagccatttattcgagtgtatgcttttcatgttatgtagactcccttcatccaacgctgtatccgcgcggaattgttctactgcttcttttgcctgtttccgtccgtttcaaaccttccgcaccgttaatatccattattttactaattattttttacaaagcgacgaaacatttcccgcttcctgccgtccaatataatgtgaacctgatgcaaaaataacagtagatgttgtcgaaatagagagaaagatttggaattttctcatttgcagagttgctccaagtcaacaatcatggtacgcttcacaaagaatagaaacgagaggtaatgatatggaagaacgatctcaacgcagaaaaaagaaaagacgcctcagaaaatgggtgaaatttgtactggtattcgccgctttcttattggtgatcgccggttccgtcggcacctacgcatttgtgaaattgaataatgcgaccaaagaagcgcacgtcagccttgaccgcggcgaccagtccgtaaaacggatcaaagaatttgacccgaagaaggattctttcaccgtattgcttttaggaatagacgcccgtgacaataagggcgaatcagtagatgacgcaagaagtgacgccaacgtgctcgtcaccttcaaccggaaaaagaaaacagcgacgatgctcagcattccgcgggattcctatgtcaacatcccgggacacggctatgacaaattcgcgcacgcacatgcttacggcggttataatttaacttataaaacagtagaaaacatgcttgatattccggtagattatgtggttgagagcaacttcgacgcgttccgcgatgtcgtcaatgagttgaacggcgttacggtaaatgtgaaaagccagaaaattgccgatcgtattaaagtcgatacaaaaggaaaagtcgtgctgaagccgggcgtccagacgcttgacggtgagcaggcactggcttatgtaagaacacgcaaagcggacaccgatctgatgcgcggacaaagacagatggaggtgctgagcgccattattaaaaaatctaaatcgttaagctcgatcccttcttatgacgatatcgtcgacagcttagggaaaaacttaaaaatgaacttatctcttaatgacgccatcggtctgttcccgtttatcacatcgctgaaatcggtggattctttgcagctgacaggttcagacagctatatttacactcctcagtacggcaaaaatatttattacttcaagctgaatgaggaaaaccttcaagaagtaaaaacaaaattaaaaaatgatttagacgcgtaagacgtcacggcggggttttagaaaccccgccgtttttctgttgaaaaaaaggacatgaaggtatagccttttaactgaaggctttctgctgatttcacacaaagctgaacatactacatgaagcagctttatttttaaggagggcatccatacatatgaaattgatagccattgacttagacggcacattactgaactcggacagtgtgatttctccggaaaacagagcggctttacaaagagcggatgaagcgggcattctcgtggccatctgcacgggcagagccacgtttgatgtaaaagcgctcttgaaggatttagatattccgatcattgcggcaaacggcgggacagtccatgacaaaggataccgctccgtcagccggctcttaatggatcagcaggccgggaaggatatcgccgcttatttaacggacaaagacatttactttgaggtctatacagatgatcatctgctgtccccatttgacggcgagtccaaactgcaggcagaactggatattctgaaaagcgccaatcccaaggaagatattcagacattatgggagggcgcaaagacgcagttcaaacaattcggcattaaacccgtacaggatatacaggcgatttttaacggagacgaacatgtttacaagcttctttgtttctcttttgatatggaaaaactgagaaacgccaaagaagaaattacacatcatccgaaattatcccagacatcttccggaaaacacattatcgaaatcctccctgccggttccggaaagggacgtgctctgacggagcttgcctcactgtacggaattgaaaaacaggatatttacgccatcggcgacagcccgaatgatttctccatgtttgaagcggcgggaaaccgcatcgccatgggcaatgcgattgatgaactgaaggaaaaaagcacgtatattacaaaaagcaacgatgaaaacggcgtcgcatatttcatcaaccggcttctcgacaacgatcaataaaaggaaaaagccaggtctttcacggcctggcttttcacgttttccaaaaaagaaattcccaaaaatgaaaataaattgtaagataaagaaaaaaggagtttcatgatgtcgaatgcaatcgctattataggatgtttagcttttctctgcgcagtcggatacggaatattccacctcatatgcaaagctgccaaaaaagaaaaacgtttttcaaaaaagctgttttggccccttctcatcggcggatttatcctgcttctgaccggcgcctccctcgcagagccggacgcctcggccgtgaaggcagaggagaaatacagcacccttgataccgcttatcaaaaattgacgaaggaacaccaggcgcttgagaaaaaatatgaaagcatcagtgccgcggccgaaaaggagaaatccgaagccgaagccggcaatgaagaaaaactcagcaaactcagccaagagataagtgagctgaaaaaaacaaacaaatcactcaaacaagacaatgagaaattaaaaaattcacaaaagaagctcgaaaagtccgctgaaacgcttcagtcagaaaataaaactttaaagcggcagaaagcagaaacaaaaacatccgaaaacgcggaaacggcgcaaaacaacgccccttcctccggcggacatgccgaaacgaaagcagccggcacctcacagggatgcgacattaaaggcagccggaacggcatttatcacacgccgggaagtacatactacgaccggacgacagatcccgcggaaatgttctgttccatagaggatgcggtagcggccggatacagagcgccgaaacggtaaaagaaaaagacgtcagagacactctctgacgtctttttttacggaagccggatcccgcccgcatatttgtccttccaataagcgcttgtgttcatatttgttatggtaacgcctgcggacacggtgacatgaatcacttgtccgctcccgatataaatggccggattcaggctttccgctttaaagaagaccagatcgccgggcttcagatcttgtttatcgaccggaacgcccgcctgcatctgcttgtccgcataacgcggcaggctgattcctttcgctttttgatagatgtattgaacaaatcccgccgtatcaaagccggtttccggtaaaacgccgcctttcagataagaaattccgatatgatcggccgctgtggacacaacgggattttctttagaaatggctaaattgctgaatcggcgcacacctgtaaaatgttttttccagtaatcttccgacaagtaagaaatggtgactttttcggagcggcttgcttggatgaaccttccctctcccgcataaatgcccgcatgggaaattccttttttatacgtgtcgctgaaataaatcacgtccccgggctttatgccgctcagtttgattttctcaccgaccagccactgctgttccgctgatctaggcaggtaaatgtgaagcttgttttcaaaaacatattggaccagccccgaacagtcgaatccctcctcgggcgtgcttccgccgaatacatacggaatgtcaaggtaacgggctgcctcctgaacgatcgggtcatcagccagttccggatcttttgtaatccgctttgcgccaagatataaattcatccaataactgcttttttgaaaccgtgtgacggttacgccttctgacggagaactgtgtatcatctctccgtttccgatataaagaccgtcatggacgggtgcgttttgtgttgaatctgactttttgaaaaacacaagatctcccggtaaaaggtcattttctttgacggcggctccgactttccattgatcactgaccgttctcggcagatggatgttctgcctgctgaaaagataatgcatcaatccggacggatcaaaaccgtcctcaggctcttcgcctccgtaaacatatttatttccgacaagtttttgcgcgtctgaaaccatcaggacagaaacttgagaatccgcttcagcaatttccgttctcgttactgcgggtgccacaagacaaatcataaggccggcaaggatgtacttcctccagcttgtgagcatgttttctattcactctcctcatttttagtagtttttacatcggtaacttttaacaaatgtttaggagagcacacaaaaaaagaatgcccgatatgggcattctttactggattcggaacaaacaatatgccggcaagcggaatcatgcgcttattttgcgcccgctgtgtcctcttgctgaatcttttgcatttccgtgtcgattttttgtttttcctgatctgtgagctgatcattgtatttaaacgctgacataaacataaataccataatgatcgcggcaaacggccatcccgctttaatgattttcatttgtttttcactccgctttcttttttaagatatcgctgtgatccacatcaaacgttaattttccatccttgacgctccaatcgaaattcgattctttcgtcagttcacgtacgatcgttttatgattgatgctgccttttttaaccggtgcaggtgttgcttcatgaatattcatcggcgtgacttcaaagcgtcccgtgccgtttttctgcagatgatattgaacaagcgccgtgtctctcgttcttgtccacccctggtcgaatacgaagttgcccaggctgtagaaaataacggtgccgtggtacatttcgatcggttctagcacgtgcggatggtgtccgacgataatatccgctccggcatctgacattgctcttgccaattggcgctgtctgtcattcggatcattatcgtattcctgtccccagtgtgtttgaacaatgacaagatcggctttctttttggctttagaaatcatcggaataaacagctctggatcggccggaagcacacccggcgcatttcgtttagctgcaaagccttttccggaaacatcagtgaaacccagtgttgcgattttgattccgtttacatcttgataagaaatgttctgctcggcttccttcagcgtgaggcccgcgccgacaagttcaagattttgctttgaaaactcttcaaccgtatcccgcattccttgagggccgtaatccatcgcatggttgttggctgccgtgagaacggtgaaattcatgtccttcaatacttttacggcatctttgtttgactgaaggtggatatttttttctgcttctttgtagttctttttatatgtaaccgggttttcaaagttccccgacacatagtcggatgcttcgaagaatggctgtgcgtaacggaagacactttccgtgcctttatgctttgtcactttctcgacattccggcccatcataatatctccgacgaatgaggcagatacaaggtcatcggcatttcttttcacactcggcgtttccgccttccctgtcaggatgcagacgaacatcaggcaaaagacgatcggcagcgcgataaaaacgtgaagattggtcttctttttctgctgtttggtcagcttcagcagtttttcttgaaagcttaattgttttttcatcgtttgacacaccttacattagattaagtagtaagcaaacataatggcaaaagttgcgccgcttaagaacagcgtgctggcaaatgtaatcgttaatccctgtttctgaatggtattggcgatcagacccggtacgatgataccgattccgcggaattctgatatctcaaacggtacgatcgggtaaaggaaatcaagggcgatttttaagcagattcccgttatcagcatagctgcgaattttctgcgtccgtacaaaatcataaatctggataaaccgtatttgacgatcacgtatgtaagaagactcactaacaatacgagtaaaataaagaccggctggttaaaaacgagccctaaataacccggcacgactaaaccggcaggtacgatacctgttttttccgcgaaaattaaactgattaacacgcctaaaataagtgagatgtataaatctgatccgaacatttatccttttcctcctagctaacgagctgtttcaccttatactcttgaattttttcaattaatggttccgctgaaccgtggatattgccgacgccatatatgacacggttttgcattcttgttttcagcacgtccatgatttcgtctgttgatttatattccagatcgtgcaatgtatcggcaggaatcttgccttcttcataagctctgacgatcggttcagtcgtctcgccgataagtatgagttccttcgttttaatgtacggaagcacgtcgtttgcgaactgaatcgttctgtccacacggtcggcgcggcagttcataataacgatcggttcatctgtcgggtagccgatttcctttacacgtttccatatatttaaagtagaagatgcatcatttgcggcaaagccgtttacgaaatgaccgggctccttcgtgctgagcagcggcaggattctcatggcgccaggatcaggcggcgcattcagcattcctttaaacgccgtttcttcatctatcccaagtgcctgggcaacgccgagcgcaagggaagcgttatcaggaaagaccatatattcaaattttcgaaggtattcatctgtaattttagagttatccgcaataataacctcggtattccgctctgcggctttttctttaaagaagtctgtgtattcactgtctgtaatgacaaggtgaccgttatacggtatcgtcgcggtaaatgcttcagcgatttcatcaagcgtcggccccatgacgtccatatggtcttcaagcacattcacgatgacgccgatgttggcttgaaggagttcttcctgaaagataatctgataatccgggtttaccgccatacattcactgacaatggcattggcgccccgttctacggtttccttcattacttctttttgctcgccgatattcgggccctgcggtttccgtttgatcggtttctcctcaggtgtatcccaatagatcatccttgcatctgttcccgtcgtttttccgactgttttgtagcccgcctccatcagtattccggtcgtcagcctcgttacggttgactttccgcggataccattaatattgacgcgtactggcagagcatcgatattcttctgatgccgccttttttcaatgattccgatgattagtacggcagcacaggctataatgagtaaccacattgatttttgacatctccttctgtattgataaattcattcatcagtatatagcttcactatgaattctcaatcggcattatgtaacataatcttcccgctttcactgagccaaacttctctattagtgacgctattcttcctattatcgaattgctttttttgggaataggcaggacttcaaccttacttcaacttttcaaaagaaaaatgaatacgtttacattttcgcgcagaaattcatttggaccaatggaactattcgcgttccggaagaaaaagatgtaatgataatccatcttttccagcccgcttgtatcagcgtttttcgcactgcgcatacgtttcgggactctctgtccgctgtgtgcagactgcctgttttgttaaggataaggtcttaaagtcattcatttttcccccgtatcctgctttcagtcccattccaaaataactagcggaatgactggtacatcacagaataagacgggtccggagtgtttacaagaaatacacattttatatgcggaaagcctttctccttttaaaccatttacaggacgtttatcactcttttgaaataattttaataaatctttatattcgttcaagaaatattcatccataattgtgaagttcttggtaaaacatcgaggaactcctctattttatagaatgcataaaaaaggaatacccgctgaaaactacagataaccagggaaggaggcggtctgatgtctgcggataaacaaaacaaacggattcccggcgattttgaatcggctgtacgggaaatgcaggagctgatgtgtgtttgcggtgattttaaaatacgaaggattaaactgcaggaccgtcataccgctttcttttatattgaacaaatgatagaagaacagaagctgaatgagtttctgttaagcgacaccctgcagaacggcccgcttgaggaaacgatgaatgccgtcagcagtgcggaaacggatgaaatcagaaaactcattgacgggattttggcaggacaggttgtttttctcagcgatgcatcgaggaaagcgaagctgttttccgtcggccagaatccgctgcgttccattatggaacccgaatctgaaagtatcgtccgcggcgcccatgacgggtttgtggaaagtttggaaacgaacattcatcagctgcggtttcacatacaggaccgccatctctccgttcattatatggatatcggggaaagagccaaatcaaaggttgcggttatctttgttgagaatatcgccaatccggagattgtggaggaagtgaagcggcgcctgtcatacttgcgtatagacagcgtgcttgcgcccgggattatcgaggaatcaatagaagataattcgttttccatttttccgcagatcattcatacggaacggccggataaagcaaaagcatgcgtaatggaaggctgtgtactgatcatgatggacgggagtccgtcggctttgattgcgccgatcacattcttttccttttttcaatctccggacgactacagcacgagatggatttccgccagttttttaagagtgctgagatttttcgcctttatgatcgcgattacgctgcccgctttttatatcgcgctgattgcgtttcattttgaagtcattcccaacgatctgattatcaccatgaaaaattcgattgttgatattccctttcccccgctgatagaagccatgattatggaaattacgattgaactgatccgcgaagccggtatcagactgccgagaccgatcagtcagacgatcggcattgtcggcggtctcgtgatcggtgacgcagtcgttcaggcgggactcatttctaatatgatgattatcgtcgtagccgttacagctgtttcttcttttgtgcttccttcatatgaaatgagcacgtccatccgaacgctcagatttccgcttatgtttctggcatcctcgttcggttttatcggcatcgcactcggcttcgggcttattctgatgaacctgtgcaagcttgaatcactcggcgttccttatttatcatctctgacgccgtttcatttcagtgacttgaaggatgcatttatccggctgccggcttggtttattaaaagaaggcctttttatttgagaccgcaagactcaaagcagatgaaacatgttcgggggtggagaaaagatgaagcctaaaaaaataagcccgcttcaaggcgtgtttttcattaatcagacgcagatcagcatcggcattttggcgcttccccatttactgatgatgagatcgggaagcagcggatggatttccattctgcttaccggattgctcgtccagcttacattcagcctgtatatgatattatttcaccggtttccgaagctgaacctgtacgaaatgctggaggaggtgttcggaacacttgccggcaaaggggtgcaggtgctgtatattttatatttcgcgtttctctgcacgctcattctttctgtatttacacggatattggatatctgggtgctccctcagactccaaattgggtgatcagcttaatgctgatcctcggttctgtctatatcgcccaggctccgctgaatgcgatcgccaggttcagctttattttaacgccgtttttgctgctgatctctctgccgcttttatacacgctgggaaaagccgatatcacatacattatgccgatttttcacggaaccgcaaaagacatgcttaccggggtgcagcaaacacttgtcagcattaccggctttcaggcggcgctcgtgatcgggcccctaatcaactgcaccgtcagccagcgctacaaaatactgacgatttcaaacatcttgattatcctttattacctgtatatcacccttacttgctttgtcacaatcagccccgaagaaataaaaatgatcccggagcctgtgctgtacctgttaaaaaccgtttcattcagaattatcgaacggacggatctgctctttttgacgttttggttcgtgaccgtcttttcaacgctggccaacgtgttttacttggcaagcaccggcattgccaagctgttcaatcaaaaagatcacagccggtttgtttatccgctggccctgctcgtcttccttctgtctatttgggccacaagcacagataaaacgatacagcagctggatcagtttttccgcttttccgatattgtgtttgtgtatttgtttccgttgtttatggtattgattgtccttgtacgcaaaaagggtgtccgccatgcgcattaaaaaagcggttcttatcagtctcatgtgcgcaagcctgacacttgcgggctgctgggatcaaaatttgctgaaagatatttctctcgtgctgaccgcaagccttgatgttgatcatgacggtaaaaataaaatcggcatcacctatcggaaggttcagtcctcccaggcggaacaggaaacgggcggctcattcattacgacggtgctcagcgcttccgggcacaccatccgtgaagcgcggtttcaattggataagcttgtcgatcagcgcattgacacgtccaagcaaagagtcttattaatcggtgagaaaatggcggaaaaaccgctttttccttatctcgatgtcttctacagagatccgaaaagcccgcttctcgctcatccggcggttgtaaaagacggcgaggcgattgaagtgctgaagctgatcgtccggcagaaattgatcgtcagcaagtatttaacgaatttattaacaagcgctaatgcggaatcaaatatcagcatggaaaatttgcaatccatccgttcaagcatgctgacggctgataaggatttcgcccttccttatttatcgattaacggacagacgataaaggtagagggttctgccctgttcagcggccagcggaaagtgactgaggtgctcggtcaggattcgaccctcctgacccttttaagcgggcaatttaataaatcggctaatattaatctgaagctgtgggacaaatacaaaatggatattgaaaattatctttctctcggcatcacggatgccacgcgaaagattgtatttatagatacagatccgcagcatataaaagtgaaaatccgtttaaagctgaatgcacgcgtcttggaatatccaaaggacaagctgaattcttatacggcaatcgaccaaataaacaaacaagcctcagcaaatttgaacagccaggccagatcggtgatcagccatattcaggagcacaactcggatatcctcggcatcggccggaaatatcaaacccattattatgagcggggcaagctgctcaattggcgtggggtctatccttccatcgagataatccctgatatcaaagtgagtatctcacaaatcggcatcgtgaactaaaagagaccgcggtctctttttttgttgccaaccgaaatgattcgtgttactctttttatgtaaacggttacatagttgaaggaggagtgtttgttggcaacgattaaagatgtcgcaggcgctgccggcgtctctgttgccacggtttcgcgtgtcctcaatgacaacggctacgtgcatgaagatacacgaacgaaggtcatgcttgccatggagaagctgaattattatccgaatgaagttgcccgctctctttataaaagagaatccagactggtcgggcttttgcttccggatattacgaatccctttttccctcagcttgcccgcggcgctgaagacgagttgcagcgggaaggataccggctgatcatcggcaacagcgatgaagaattggaaaaagaactcgactacctgcaaacatttaaacaaaatcaagttgccggtattttggcggccacccattaccccgaccttcccgaatacagcggcagcctttacccggtcgtatttctggaccggacaaaagaaggcgccccatccgtattcagtgacggacgggcaggcggaaaacgggcggctgaggaaatacttcgcggcaaaagcacaagcatcacgcttgtcaaaggcccagcccaccttccgaccgctcaggaacgttttaacggcgcacttaacgtgctgcaaaaagcgaacgcgcagttcaatgtcatctccgccgcttcattttccatcaaggatgccgccattttagcagaagaattgtttgcagcataccctgaaaccgacggagtcattgccagcaacgacattgcggcggctgccgtcctccatgaggcgctgcggctcggcaaaaaagttccggaggagattcagatcatcggatacgacgatattccgcagagcaggcttttgtttccgccgctttcaaccatccgccagcctgcatatgagatgggaaaacaagcagcaaacctgctgctgcaattgataaagaaagagccgccgaaagagacggccattcaaatgcccgtgacttacataagaagacaaacgacgagaaaggatgatcaccatgagtgaaatttgtgttatcggaagctgttctatggatcttgtcgtcacatctgaacggcgtccgaaagccggtgaaaccgtactgggcacagactttcaaaccgtgcccggaggaaaaggcgcaaatcaggccgtagccgcttcccgcctgggcgcaaacgtatatatggtaggaaaagcaggcaatgacagctacggaaaagcgattattgaaaacctgaaggcaaacggtgtcaatacggaccatatggaaacggttacacataaaaaaagcggaacggctcatattgtgctcgcagaaggagacaacagcatcgtcgtcgtaaaaggcgcaaacgatgacatctcccccgattatgccaaaagtgcgctagcaaaacttcccggcattgatatcgtgctgatccagcaggagattcctgaagaaaccgttgaagaagtgtgcagctactgccgcgcgcagcaaattccggttatcctgaatcccgcgccggcccggccgctgaaacaatcgacgattgaggatgccgcatatcttacgccgaacgaacatgaagcgtccattttatttcctgaccggacgaaagaagaagcgctcgccggctatcccggcaaactgttcattaccgaaggaaaacaaggcgtgcgctactcagacggcaccgcggaacggcttgttcccgccttccctgcagaagcggttgacacgacgggagccggcgatacctttaatgcggcacttgccgtcgcactcgcggaaggacgggacattgagcaagcgctcctgtttgccaaccgcgccgcctccctgtccgtgcagcacttcggcgcccaaggcgggatgccggccagaaaagaagttgaggagctgctgtcatgaaaaaacacggaatgttaaacagccacattgccaaagtattagctgatctcgggcatacagacctcatcgcaatcgccgatgcgggtctccccgtccctgacggtgtccctaaaattgatttgtccttaacggcgggcgttcccgcctttcgggacgtgaccagcctggtagccggggagatggcagtcgaaaaggtgatcgccgcttccgagatcaaagacgcaaatcctgagaatgcaagtttcatagaaagccatttctcagcgcagacgatcgagtacatgtcccatgaggaattcaaacggctcacacagaaagcaaaagccgtcatccgaacgggtgaaatgacaccatacgccaactgcatcctgcaggcgggtgtgattttctagaaagaagggatccagcatgcacatcggcatgacagacattcataaagcattcggcaaaaaccaagtgctatccggcgtctcatttgagcttctgccgggagaaatccacgctttaatgggagaaaacggagcgggcaaatcgacgttaatgaatctgctcaccgggctctaccggctcgacaagggaaacattacgataaacggaacaaatatgagcttctccaatccaaaggaagccgaaaagcacggaattgcctttatccatcaggaactgaatatatggccggacatgacggtgcttgaaaacctttttatcggcaaagagctgacgacggcgttcggcgttttggaaacgaagaaaatgaaagcgctagcaaaatcacagcttgaaaaattgggagtctctcttcctcttgaccgggaagccggacaatgttccgtcggacagcagcagatgattgagattgccaaagcgctgatgacaaacgccgaagtcattattatggacgaaccgaccgcggcgctgaccgaacgggaaatcagcaaactatttgacgtgatgacggcgttaaagcgggacggcgtatccatcgtctatatttcgcaccgaatggaagagatattttcgatttgcgaccggatcaccattatgcgggacggcctcactgtcgatacggcgcatatgaaagacactaattttgatgaagtggtcaaaaaaatggtcgggcgggagctgaccgatcggtatccgactcgcacgccgtcactcagcgataaggtgctcgaagtgaaaaacgcctcaaaaaaaggaagcttttcacagatcagtttccatgtgagcgccggagaaatcctcggcgtttccggcttaatgggtgccggacggacagaaatcatgagggcgctgttcggaattgacaggctcgattccggagagatctggatttccggccgaaaaaccggcattcggggtccgtacgatgccatccgtaagggactcggcctgattacggagaaccgcaaagatgaagggctgctgctggatacgtccattcgtgaaaatatctccttgccgaacctgaccagcttctctccgaaaggcatcattgatcgaaaacgcgaggcggagttcgttgagctgctcatcaagcgtctgaccattaagaccgcatctccggaaaccgccgcccggcatttatcaggaggaaatcagcaaaaagtcgtcatcgccaaatggatcggaatcggcccgaaagttctcatccttgatgaaccgacaagaggcattgacgtaggcgcgaaaagggaaatctattcattaatgaatgaactgaccgatcgcggagtcgccatcatcatggtgtcttccgagctgccggaaattctcggcatgagtgacagaatcatcgtcgtccacgaagggcgcatcagcggagaaatcaatgcggccggcgcaacacaagaacacatcatgacacttgccacgggagggcagcagtatgaaaactgaaccaatgacatcaactgaacaaaagcgattttccattcacaccttcacacaaaaactcggtccgtttctcggcttactgattcttgtgctgatcgtttccgttttaaacccgagttttcttgaacccctcaatattctcaaccttcttcggcaggttgcgattaacgctctgattgcattcggaatgacgtttgtcattttaacgggaggcattgatctctctgtcggagccatcctcgccttatcgagcgcattggtcgcaggtatgatggtctcaggcatcgacccgatcttagccgtcatcatcggctgcgtaatcggcgccgtactcggcatgataaacggattattaatcacaaaaggaaaaatggcgccgttcatcgccactttggcgacaatgaccgtctttcgcggactgaccctcgtctatacggacggaaatccgattacggggctcggttcaaattacgcatttcaattattcggacgcggttattttctcggcattcccgtacctgccattacgatgctgattgcgtttgcggccctgtgggttcttctgcacaaaacaccgttcggccgccggacatacgccatcggcggcaatgagaaagcggcgctgatatcgggaatcaaagtgccccgcatcaagatcatgatctattctctgacaggtttattatcagcgctggcgggagcgattctgacatcacgcttaaattccgcacagccgacggccggggaatcatacgagctggacgccatcgcagcggtcgttctcggcggaacgagcctgtccggcggtcgagggcgcatcatcggtacgctgatcggggttttgattatcggtacgctgaacaacggcttgaaccttctcggcgtatcatctttttatcagctcgtcgtcaaaggaatcgtcattttaatcgcggtgctgctggaccgcaaaaaatcggcatagtaggaggaccattatgaagaaagccatcatcacgatcgcggcattatcactgtttttgctgtccgcctgttcacttgaaccgccacaatgggcaaaaccgtcaaacacaaaacataaaaaagaattcactatcgggctctccgtctccacattgaacaatccgttcttcgtttcattaaaagaaggcgttgtaaaggaagccaaaaaacggggcatgaaggtcattattgtcgatgctcaaaatgattcatctaaacagtcaaatgacgtagaagatttgatccagcagggagtcgatgcgctgctgatcaatccgaccgattcatcagcgatttcaacagccgtcgaatcggcaaattccctcggcattcccgtcattgcgcttgatcgttcagccgaacacggaaaagtcgaaacgcttgtcgcctctgacaatgtcaaaggaggagaaatggcggctgactacctcgccgatcagctcggaaaaggcgccaaagtggcggaattgcaaggggtgccgggcgcatccgcgacacgggaacgcggaacgggctttcatcatattgccgacaaaaagctggatgtcgtaacaaagcaagcggcggattttgaccgtacaaaaggattgaccgtcatggaaaacctgctgcagggacatccggatattaaagccgtgttcgcccataatgatgaaatggcactcggcgcgctcgaagcgattaacagctcaggcaaacacattctggtcgtcggtttcgacggaaataaagatgcgatttcttccattaaaaacggaaagctgacagccacggtcgcccagcagccggagctgatcggaaaactggcggccgaagcggcggagcaggtgctcaaaggagaaaaagtcaaaaaaaccatttccgctccattgaaacttcaaacacaaaaataaccggccgatgtttagacttccggtaaaacgtgaaaggatgaagtaaaaggagagatacagatgaagaaaacagccaaagcggcatccattctgacccttgcagcgggaataacagcggcttcagctgccggaataacgcctcttcccgagacacacgcgcaggaagcggtcaaaattgacgatctgtacagctacccgcttgactcttatctcgtttccgcggaagcattgaacgtcagaacaaaagcatcagcagccagtccgagagctgacacccttcatttaggcgacagcttaaagatcgtttcattccagaacgctgactgggcaaaagtacattataaaaacggaaaaacaggatttgtatctactcattatattgttaaagaagcaacaaccgtaaaaacgacggcaaaaacaaaagtatatacagacaaacaagcggtcaaagcttcccttgctaaaaacacaagcgtttctttcctcggatggaaaaagacagccggcggcggcattgacttcggctgggcgcttgtcgattacgggggcgcaacgggatatatcagcacaaaagatctgcaaaaactgacataatatcaaaacggatttcgcaaattcagcgcgaaatccgttttttctttcttgagcagtcagaaacgtctaaggttcgaaatatttctcaggaaatattgtcggatgaagatgaatgcatacgactctaaaatggcttctttatgtaatccgccaggcgttttgcattgtcacggatagccgcagcatcggcgctgcttaccccgtacatcgcgaaagccggcaaataggtcatacccgtaaaattagccattgcctgaaacggccttaagagctcgctcagtgaaaaatggttagacccgcctgcctgatatgcatcctctccggcacctacggaaacagccagcagcaattctttgccgtgcagcgcctttcctttggagccgtaagcccagccatacgccagcacatgatccatccatgtttttaaaagcggaggcgcactgtaccaatacagcgggaattgaaatacgatccggtcatactgttcacacagctgccgttccttttccgcatctattttcccgtccggatattctttataaagctcacggaccgtgatttcatcatgattttttaattcttctgtccacgccttattgaccgctgagttgtccatgtcaggatgaaccgctaataccaatactttcacagctaccacacctttcccttttgactgtattttacctaatctttgccggttcagccaaataaaaagaaagcccccgagaaaaatggggctttcttttttaatttattccgggcttccttcagttgtttcaatatccttcgcaaaattcggattatctaaatttgcgttgaaaaagtccgccgtattcggaagcttgaggttcatattcattttttgagaaatggtcactttacaatctttaatgacatagtcaaatacgtgtccgccggaattgcgtccttcatcaatgaagtgcaggtgatatccggaaacagcgatgccgtttgcgtaccccggcgtccagaagccggcgattgtaccctgaatgtcgtcaaagttgaacacaggctgtgttttcaccgcttcgatcatcggaacgtacggtttctcctggcgttctaccgttcttgtctgcacctttttaaatacgccgtctaaacggatcgcataaaataagtttttactaggcagaaggctggcgatttcctgctcgaattcttcacgggtcatttcgccgtcgatcgtatgcgtcatatccggcgtgaaaaatgtgaatgagcagaatggtgacaggtctccgcctttaacaggcgtagccgttccgtcgccgcgcagacggtaaaattctccgtcaaatccgattaattcgccgtccagtttattgaacgtgccgattccgaaatcaccgaacttcggaatgtcagccatatcaaaatctccgtcatatactccgtccagcagagatgtcattgttgatacttgatagatctgatcctcaggtgagcctttttctccgcggctcatcatatggatgtcgcttgcgtttttcatattcccttcactccttttaaattgggctgttttagaaaacaggtcatggtgcgcagagtgctagagagcttttgctttcattttttctttgaattgcttcggaagcatgtcgcttgataaatggacattgtcactgtaatcgacaggaatgtcaatgatgacaggaccttctgtgttcaagcctttttgcagcacgtctgccagctgttccggtgactcaacgcgcaagccggtggcgccgaagctttctgcatattttacgatgtcaatgtttccgaaatctacgcatgacgtacggttatattttttcatttgctggaatgcgaccatatcatatgtgctgtcattccatacaaggtgaacgatcggcgcttttaagcggactgccgtttccaattccattgcagagaacaggaatcctccgtctcctgaaacggatacgactttttcacccggattcaccaatgtggcggcaatcgcccaaggaagcgctacgcccaatgtctgcatgccgttgctgatcaacagtttcagcggctcataagcgcggaagtagcgggacatccagatcgcgtgcgaaccgatatcgcaagtgacggttacgtcgtcatcaattgcattgcgcagttcttggacgatttgcagaggatgcactctgtcggatttatggtcgcttggcgccttctcgctgtctgtgagcatctgttttaattcgctcagcacttcttgttcacggctgcccatatcaaatgtcacagcgtcgtgttcaatttgtttaaccgtagcggcgatatcgcctaataattctaattccggctgataggcatgatcgatatcggcctggatttcgtcaagatggataatagcacggtcaccgtttacgttccagaacttcggatcgtattcaatcggatcataaccgatcgttaatacgacatccgcctgttcaagcagaagatcgcccggctggttgcggaacagtccgatccggccgaaatattggtcttccagctctctggacaatgtgccggccccttggtacgtttctacgaaaggcagttttgttttggcaagcagtttgcggatttgttttaccgcctccggtcttccgcctttcatgccgactaacagaacgggaagtttcgccgtctggattttcgcgatagccgcgctgaccgcttcttccggtgcagggccttgtttcggcgccggcacgctgcgtacgtttttcacatttgtgatttcattcacaacatcctgcggaaagctcacgaaagccgcgcctgcctgacctgctgacgctgccctgaaggcgtttgttaccgcttctggtatattccctgtttcctgtacttctacactgtattttgtaatcggctgaaatagcgccgcattgtccaatgattggtgtgtccgttttaaccggtctgcgcgaattacgttacccgccagcgccactaccggatcaccttctgtattagccgttaacaagccggtcgccaagttggatgcccccgggcctgaagtaacgagacaaacgcctggttttccagtcagtcttccgacagccgcagccataaatgcagcgttctgttcgtgacggcataaaaccagttcaggtcctttatcttttaacgcatcaaatactgcatcaatttttgcacccggaatgccaaaaacatgtgtgacaccttgctccactaagcaatcaacaacaagctccgccccccgattttttccagaggtttttagttcatttgttgcttttgccaacaccctcactccttattatgcatattaaatataaaattttaagtaatttgtgatattattcactatacactctttggaaattgacctccaatatcaattcgccgtatgattaatatgtttcacgaataattaacaaagagaaaggaatggataaggatggagcttcgccatcttcaatactttattgccgttgccgaagaacttcatttcggcaaagctgcgcttcggttaaatatgacacagccgcctctcagccagcagatcaaacagcttgagaaggaagtcggcgtgaccttattaaagcgcacgaaacgggttgtagagctttcagctgccggagaaagttttttaaaacacagcagaaacgcgatcgaagaaatagacaaagcgattgaaatggcgcagagaacggcgcggggagagctcggccgccttgtcgtcggttttgtcggctcggccacatatgaatttctgccgccgatcattcgggaattccgcgaaaaattcccctccgtcaagcttgatctgcgtgaaatttcttctttcagacagcaggaagaacttctgaaggggaacattgatatcggcatccttcatccgcctttacagcattccgcgttacatatggaaaaggtgcagagcagtccgtgcattctggctttgccgaagcagcacccgcttaccgctaaacagacaatcgacattcaggatttaaaaaatgaaccgattatcacactgtcgaaagaaacatggccgactttatacctagagtttgtaaactactgcgagcaggcgggcttcaaaccgaaaatcgttcaggaagcgacggagtatcaaatggtgatcggattggttagtgccggcatcggtgtaaccttcgtgccttcttctgctaaaaagctgtttaatctcgaagtcgcctaccgcggcattaatcaggtgcagctcacggccgaatgggtcattgcctaccgcaaggataatcaaaatccgatcctgaaacattttctggatattatgaataaacgccaggctttattgcaggcggataaggaaaatgcataaaaaagagggccgccgaaagcagcctcttttttttgtgcttttatggatttttactaaattggtagaaacgctcagtacaccttacgacctgtacccgtatacatacagtacaactgatcaggagggataaaaataacggggcggcaatgacccatctaaaaggaggcagaacacattacacatattaccgtcattttgaccctgatttctttctttgtgaccattatttttatattttggagacccgggggattaaatgaagccgttccggcgtcgctgggcgccattctcgttttgttatgcggaaccgtttcctttcatgatttgggggatatagggtcaaaagtcaccggagcctcaataaccattatctccacaatgattatggcgatcgcgctggaaagcttcggtttttttaactgggcggcggccaaactgcttcaccgcgccaagggatcgggcatccggcttttttggctgaccaacctgctctgtttttcaatgacgctctttctgaataatgacggcagcgtcttaatcaccactcctattttactattggtcttacaatatctcggacttaaaagacatcagaaaacaccgtatttaataagcggcgtattaattgcgacggcggcaagcaccccgatcggcgtcagtaatatcgtcaatttaatttctctcaaaatgataggcatggacctttatttgtacaccaatatgatgtttatccccggcacgctgggactggtgtttatggcctttctgctgtttgccgttttttaccgccgtttgccgaaacagctccccgatattccggttcattttgactcgctggaacacaaacgatatcatccgcttcagcctccgccagacccgacccaaaacagccgtacgaacatcatgttttgtgttttggcatttgtattgttcgtccggatcagtctgtttgcagcttcttacaacggcatatccgtttcgctcgtggctgtcatcagttcagtcatcctgcttggctggagatggttttatttaaaaatcggaccggcagatttattaaggaaagcgccttggcatatctttatttttgccttcacgatgtacattatcatctacggactgcataatatcggactgacggcgctgcttgttcagtctattgagccttatgtctcacaaagcattgcccacgctgcatctattatgggcattgctacatccgtcctctctaatttgttcaataaccatcccgccttaatgatcagcactttgacattaactgaaatgtccatcgacccattaaccgtaaaaatcatttatctggctaatattatcggcagtgatatcggatcattgcttctgccgatcgggacattagccacgctgatctggatgcatatcatcagacagcacggcgaaaaagtttcttggtcagaatatatcaaaacgaccattatcgttgtccctctcactgtcgtgtttaccattaccgttttatatgtttggatcagttggatttacctttagctcccatgaaaaaaaactgcctgctgtataagagaggcagttttatcatttatggcaggtgcatggtttttaaatgattcaatttccaaaaaacagtatcgccgtctgcattggtcagttcaagaatattatctgagacatcctgcaacagccccactttattcggtatatctcctaaatccagaataatcagcttcccgatatatctttttaattgttcctcaaaattccggacaaggggcacattagcgggaacaaccggcagttctgaactgtttaatgtatacggcgtctgctcatcggaatagggtgtcagccatttcaaatgatgcatcgagatgaaaagagtcttataaaccggagagaagaaaacaaaataatcatttaaaacacttgtcacatacccatgaatggaacggtctcccgtaacaaatatttctgtgaatctgccttttatatgctggagggtattccggtaagaaaaggaatgttcctgtttttcgggatgcggacttttttttcttgcgtacggttctttattctcttcgtccgggagcgtcaatgtcattcgctgaaggtgcagcagcggaatataaagaaacgtccggccgtcatgaatcacaatgatatcctgaccgatatccaaaagagttcctggaaatgtcgtattccccgatatctcaatatcgacttgtttatccagaaatctgcttaatccagccatttcattcccccctctcccgcgtttacggacaatctttccaatcatttacggccgcgtttccaccgataatctattgtccttaatacagtggcgtagctataagagacctctttctcccgttttgaggatcgaacggatcttgatgatcttttcgactttttggaggaagtacgctgctcttcgcgtgattcttcttcatgcggcttttcttcttcggcgctctctttctcacctttattctcgtcgtctttattctcctcttttttagctgctccttttgccccttcgctgatgctcttgatatgaaaaggataaatccgcagcacttctttatctttcacaagagtgtagtggccgtcggaattatccacaagtattccttcaactgcttcaggacctccgcggttgatggatacccatttgtggatcaggcgtttaaatatgccgtgaaaatcatcagccatttcaaattccgggcgctcctcctcttggccgtcctcttcttgttccgcgctgatgcttttgacatggtcggcgttaaaatatacaattccgtcatcttccgtttccagcacgagaaaatcatcccctgtttcgtgaagctttcctcttttcgattcgggacctccctgattcaattgcaccgtgcgattggtcatccggctgatcaggtcttgaaaatcatcagctttttcacattctgccgcttcggccggcgatacggtttcactcgtattttccgtcacacttttcacgtgtttccattgataataaacgattttattatcaacctgaagagcgatataatccgattgaatgtctgctaatctccctgtcttggactccgggcctccccggtagacagtaatcacttttccttccatcgcatgcaaaaagttgtcatcagaccgctgccgcttcgtattgcgtttcatctattgtcctcctagtcatttttctcataatgtaaaaagcataatgcatatatacgtatcacgattattttcgggaactgattcaccagcctatttgtaaaaaatctttcttcatttccaaatcagatattccaccgctctaactcactgctgatgaaggctgaccgctccttaatgtattcgcaaatcacttcaggctcccggtcaaagcaatccatctcttctttcttatatggatccttcgcgacatgcggcctgatctgctcatacagtgacatgaccttcggcttcatatgttcaatggtaaaccgggtctgaagcgtctcttccaaaagccttttgtacgctttgcggaaatacggttcatccagaagccttgcagtcaaggtattaaacccttgtattctgacataatcggcctccatccgatcaccatgaatgtctcttccccacgtcgcatcgtaatcccacggaatgacttcaaaaagtcccgtttcatgattccggtacaaagcataattatggacaaatccatcgtagtttgaggtaaacacgatgcccgcaagccaccgcaaatacttatcggcgtccaagtgtttgacgatctcccccttgaactctgacttcggcacggtattaattttatagatcatatcctgcaagtataaatcgtcttctttcgttcccgttttcttttcataaccaagttcgagcgatgttttcgtatcccgctccagatcactgacgagggagaaattggcgtcgtcatcaaccgcgtaaaaaacagcgccgtccgccaaattccgtttcgccagaaaatattcatccactgactccagctcaagatacaccccctcatgtctgccattgatttgcagggttacgaaattcgcctttggtgacagcgtcccaagctccgcgaagaaatcgagagacagcttattccgcatcatcgacggatctttgtattcagcgtttaaatgtatctctttcgccctgcgaaatgttttcggcgaataaaaagcgatatgatacgattttttcttaaaatctcttatatgcgagccgcggtacgccagatcaatgtcaagccgtttttgattcactctcagcaccgcgggcaccggatcatcatcccaaatgtcttttttcagctccattaagtctttcgggtgaataaacagctggtatagaggcaatgttgattggtctttcatcagtaaacctccctgtattaatttaggctgtgctttttatataaaactcagcgaatcacacatacacttttttcattcatgcgtactatgtggtagtaaggatcgcatccttaaaacatatatcatgaggaggtttcaaaatgggccactattcccattctgatatcgaagaagcagtaaagtccgcaagcaccgagggattggaagattatttgtaccaagaaccaaaaagcagtaagaagagaaaatctcgcaagcataaaaaatcccgttctcacaaaaaatctcgcagccataaaaaatcgtgccgctctcacaaaaaatctcgcagccataaaaaatcgtgccgctctcacaaaaaatctcgcagccataaaaaatcccgttctcacaaaaaatctcgcagccataaaaartcccgttctcacaaaaaatctcgcagccataaaaagtcccgttctcacaaaaaatctcgcagccataaaaaatcgcgccgctctcacaaaaaatctcgcagccgtaaaaaatcatgccggtctcacaaaaaatctcgcagccacaagaaatcatgccgccgcaagaaaaaacgcacgcagaaaaaaccttatcgtcctcagaaaaaagacccttgcaaaaaagacgattactgcagcaaaacagagtactggaaagacgggaacatctgggttgtaaagaaaaactacaagtaacaccattcgtaaataggctgccggctaaacggaagcctttttcctcaatcagatatatgccacgtgataagatatgcagccggttttcttttgttgtgtttccgaattttctttctgtataatcaggtcatacgataaagaaaggcggccgaaatcatgcatatcttacgagcagacgaactgaacgcaaaagacacttacaaattgctttcgggcacagtcgttccccggccgatcgcatttgtcactacgcggtcatccatcaacggcgccgtaaacgcggcgcccttcagtttctataacgttgtctccgcagaaccgccgcttctggccatctcagtcagccgcgcggacggtcggcagaaagacaccgcgagaaacgcactcgctcatcgggaattcgtggtgcacgtcagtgatcagtccattattgaagacattaacaaaacggcggcaaggcttgatcctgatgtcagtgaacttggcatgacagacctttctgtgacagacagcgcttgcatcagcgttcccggtataaaagaagcaaaagtgaggtttgaatgtatactcgaacgccatcttccgttccaaaatgacagcggagaaacgacgacagacctcatcatcggcagagtcgtttgttttcatttgaatgaccaagtatatgacgccgataaaggctacatacggacagatgagctgaagcctgcggcaaggctcgcggggaatgaatacgccagactcgggaagacatatacgcttgtccgcccgacctgaagcaggaaccattataatagaagaaactagtcaaaaagacccctttcgaaaggggtctttttgagtcttttaccatataactcagcctaatgtcttatagaatgccgaaacttacaaggccatcacccgtatgaaacgagtgacacatttttaggaggcagatgatggatttcattcagttactgattttttcagccgtatttattttgctcagccttatgtttcaagtatttgccgtcaaagttctcaatatcgattaatcgaattcacactgcttattacgggcatcgcagcggtgacttttttcaatgaaatgtacgtatttgcgggagttgtttctattttgctgcagcggcataatggaatggcggcaccggcgggaggaaaagcaatatgtgtacgattcgttttacgcgggtctttctgccgcgcttggcgtgcttatttttttcatcagtcagcctagctctatactcctgcggccgctccgtcgccgcgcgggtcggccccgcctttgagaaagcctacttcatcaatggcgatcgctgccgcatggcccataagcccgtcaaaatcaccaacggtctcgacgcggtggccgctctgccttagagcttctctcgtctcagggctgattctgctttcaaccctcagcccttcatactcctctccccatgtccgtccccagacccagcgcggctcattgatcgcctgctgggggtccattttgtaatcaatgatgcgcgtaatcatcgctgtctgagtttgcggctggccttctcctccctgggttccgtacaggatgtgaggctttccttctttacaggccatcgccggcatgagggtgtggaacgtccgcttgcagggttcaagtgtattgacatgggattcgtccagcgaaaaaaatgacccgcggttttgcagcagaatgcccgtctccccggctgtaacggcagatccgaactcgaaatagaggctctgaataaaggaaacggcatttccttccgcatcggcgacggcggcataagctgtgtcgcttccgaccggccggcttaccgccggcgcagccacgttaccgatttcttccgcaagctgctttgcataccgtttatcaagcagccgatccagcggaatatgagaaaatgccggatcagtcagcacttcattccggtgctgaaaactcttcttcagcgcctcgatcagcagatgataatagtcaaaggaaccgtgttcgatctgagaaaaatcatagttttccaatatattgagcgtcattaagcctgtaaaaccctgtgaattcggcggagcctgatagattttgcacccgcggtaatcggaggataccgggttcgtccactcgccgcggtgggctttaaagtcatcaagtgtcagacggctgccgttgttttgcaaaaaggatgtgatgcgttgagcgaggtctccttcataaaaagcgcttctgcctttctcggcaagctgctccaagctggccgccagatccttttggacaaaccgttcaccgggcatgggcgcttttttgtttctcgtataaatggccgaggtgtaaggcgtcgaggctaaaagagcgagattgcgttctgtgtgggcgcattggtcggcagagaccggaaatccgtttgccgcataatcaagagctggcttcagcacctcagcgagcgaaagacgcccgtacgccgaaagcacggcatcccagctgtccgccattcccggaacggtaatggcgctttctgtcccgcgcagagggatcgcttctctgccccgatacaagtctctcgtcacatgcttccctgaacggccgctcccgttataagctttgattcgtcccgtttctttatggtaagtgagccaaaatgaatccccgccaaggcccgtcatatgcggatacacgactgccagacaggcgctgaccgccactgccgcgtcaaacgcgtttccgcccttttccagaatgccggcccccgcctgagaagcgagataatgcggactgacgaccatttgtttcgttccgatggttgaagtattcatggcaagcccctttacaaattttctcaattataaaaatcggcttcgcggccatccacattcctgaaagaaaatctcacacactatttacttttcgataagaaataattctaagtcattacgtatcgaaaacaataaaaaatttctgccttcataccgtaatgtttcatgatacaataatgtctaccaaatgaaggaaggtgaagcgggttggaacatgaatacagcattccgaatcttgtccttgatgaaacggataaacagattctttcgattttgcacgaggaagggaggatttcctatacagacgtaggaaagcgggttaacctgtcgcgagtggcggttcagcaccgcattcagcatttactggatgccggtgtgattgaaaaattcaccgctgtcattaacccggcgaaaataggccgccatgtgtccgtgttttttaatgtggaggtggagccgcagtatttggaggaaaccgcattaaagcttgaaaaggaaccggcagtgacaagcctttatcatatgaccggaccgagcaagctgcatatgcacggtattttcgcaaatgatcaggagatggaagagtttttgacaaaacggctctatacgcaaaaaggcgtcgtcagcgtcgactgccaaatgctgattaaacggtataaaagcagaacgggcatgaagctgtaaggaggacatagccatgaaacatccctattgggacattacggcggcgatgatccgaacgggcattttcggattcgggggcggcccgtcggtgatcccgctcatccgccatgaagccgtcaataaatacaaatggatagatgatgatgaattcggagaaatattagcgatcgcaaatgcgcttcccggaccgattgccacaaaaatggccgcgtatctgggctttaagctgaaaggcacgttaggcgcaatcgtggcaacccttgcccatattctgcctacatgccttgctatggcgggcttgtttgcggctgtcaatgtcttaagccactcagcaattgttgccggcatgattggcgccgtaacaccggtaatcgccgtcatgctcggcattatggcgtacgagtttggccaaaaagcgcttaaaggtttcggctgggtcaccggcattctgttttttatcatcgcttttatcggcctgcaaacgctgcagatcaatcccggctttgtcattattattttcttagcatacggcgcgtttcattttaaattgaaagacaaaatcacaaataaacgttcaaaagataaaggaatgtcggcctcatgatcatgatttatgtatttatggcgttttttgtcgcaaacgcactcggatatggaggcggaccggcgtcaatcccgctgatgtttgaagaagtcgtcaacagatacagctggctctcaaacgatcaattctcaaatatgctcgcgcttgcgaacgcattgccgggcccgatcgccaccaaaatcgcggcgtatgtcggctacagcgcaggcgggtggcccgggttcctgattgcgctgatcgccaccgtcgtaccgtcggcgctcgcattgatcgtcctcttgcgcatcattcagcgcttccgccaatcacccgtcatcaaaggcatgacgctgtccgtccagcctgtcatcgccgtcatgatgctcattcttacctggcaaatcggcgcagacggcatcaaagcgatcggctgggttcaagcgatagtgattgcggggatttccctccttgccttgacaaaattcaagatgcatccggccttcctgattatcgcggcgtttttgtatggaggtcttgtggttcctcatttatagaaaaaagcacctggacaggtgctttttgtttcagtcccgatatgttgttcgatatagataactgtttcttcgtctatgcttcttacatgtgattcctgtcatcctcccagatggcctgatcaataaaaaacatttgcagcctcccggactgcaagtgttacacgtgatttttccgataaaacgttcgcaaaacatgcgtttcaaggtcagccagacggacagggatcggcagcctgctgtctcgattgatcattttcattgtgatctgatagctgctctctaaatcaatgttatgtccgcaagacaagaagataggcttcacgtcccgccgtgtccgaagcgcccggccatatacctcgccgtcaatgagaatatcggtgcaggcgccgacttcattttcgggcatctcaaaatcgcatcctttgattttgagataggttttcgcaatcccaattgtaggcttacccagaaaaaaagccgcatgggtggcaacgcccatatgattgtaatgcagatacccgttgccatcaaacaaaaacacatccggctccgcctccagcttttcggccgcttcaatgatcagcggcagctcgcgaaacgcaagaaaaccggaaacatacggcacgctgattttccccatgctgtgtactttttcaatcacttcttttgtatcagcgtcaatcacgatgatactgcatacgccgtacggttccccgtcctgctcccaataagcgaggtcgacgcctgcgcaggtgttgacggagtctggatggatgacgggggataggttgattttatgtattagggattgttgtgtttgaataaaatccgattcatcatttagatcaaaatcgtgaatttgatgtattttcatttcattggttttcctcattttcatttctaaaatcgtcttttcagttcaagttcttcatttcgatatacaatgcaataaaacttccataaggataatctccatcccagccacatggaaaatagcccgctttataaattttgaaaagtttttcaaaaaaattgtctgttttcccgtttactgctctatttattgcacaattattcagatctgctacgatctcttcaagaaaagtattaaattcagtcgtagcacttctgacattttccgaaaaaattttcagaagcatgtctaggttttgtggtttttgatcatcgtttaatttataaaattttccccatacctcactcatctcgttttcttttatatctttccacgcatattcatcttcaccaattacatcttcgtaagcatagtacttagctttttcttcatcattaataattttagtaaaataagagatatcatgtgatgcaactgctttaaaggttttggaaaaatcaataacttcttttacctgattatgataatgtccgtatttcattactttatacacctttcctaagtacaaccgtagggttaccaactctccggtaaccggaacgcagcctaaagctaaataaatttttcagaatttacaaaacagaaaacaacaattcacctatgaaaaaaccttgaaaggcttcagcagccatcaagtttaattaatttttctaaccattccctcttataagtctaatcctcaattaaatcaagataatatttatcatttttcataagttctattaaaaactcttctaatgaatctgcaatttttatatcatcgtaatatattgaattgttttgttcattgcctaatgcaattaacgataaagcactttcatttgcttcaaaaaaaatcaatttatcttcttcaagttcctcataaacttctatatctggataaaactcaaagtcattaacttttaatcttgcatctctaattgaagcaggtccaagaatgcgattaatattatattctgattttttcagaaagccgtatccaacctcaagaagaaactgtctcaaatcataaggtaaccttaaacctaacttattttctacttctaagatttcattctcacttacttgataaaatgtattttctttgtaagttttaataaaatcatatttcacaattatttacctcctttaagtgggagagtttttctcctgtgacggggtcatagcccaacagacatttaagtcattttaaacagaaaataacaattcatttgtaaaaaaccttgaaaggcttcactagccaatcaaggtcaattaattcttctaactatcccatttttaagtctaatcctcaattaaatcaatataatattcgttatcattgaggaactttttaaaaaaatcctctaacgactcagctatttgagtgtcaaaataaaatattggattgttttctaattgtaaatctatagaaatataaacaccctcgtttacttcaaaaaaaataagtttattttcatcatcataaagttcatctaaatctgggtcaaactcaaaaattccttctcttagtctaatgtcggctactgcccctggccccaatatcctattaattgcattatcactttcacctttaataaaaccataaccgacttctaaatataattgttttaaatcatttggaatatctactttcattctttgttcagcttttaatatatcctcttcaggtaccttatatgttttattttctaaatgatttataaattcaaattcagccatgaactatttttacctccttggaaaaagttttcctgatggtgctccctttccatgtatacccgcttggtgttcatccggatattttgccggatgaatattccaccattcgtgagggccaccaaagttgttctctatgatatgatgggcatcgtacggttgaccaatacttcgagcaacttctccatgcttatcaaaaacctcttctgtatatctaggccacttttgattggttttttcttcccattctgcaatcaatctatctttcaaacttgatgtgaatttgctcctatgcttagctgtttcttttggtgttaatttctcatagttattatttcttaaagcttcttttatatggtcgatctgctctttacaaacctttcgtccagttttggcttctatatctctgagatatgctttcgctaagtctttatttagttcaccagtagctttagtgccttcactatgaacgtctgttttttgcctctcaactttcagcaccttaggctcttctacatgatctgctttcggttttttcgcaaattttccatcgcttgtgcgaaacactttcgacgaggcatcatagaataccttccctgtttgtgtaatatagtgaatatggtctttagcaacttgttttaggtaattaactggatactgtgcgactttcttgacagcttctttattaatcaaattctcggtatagtggctgcttttagcatatgcgtatgctggctgatttcggaatgttcccatcagctgtttcgcaaaacgtacggtttcaccagctgattctatcaccgataaagatcgttttttaactgattgataggtttgatgagctacttttttcacatgggtcggattcacgacatgtcgtatatctgatagtttcactttaactgtcgaacctttatccatatttcgatacattgatacactatgatcaaccgatttggccagactgcccgctccaaccaaactcagcgcagcttccagtgccccttgcttccgcttctcctcggacactttgtttccgaacatatctctgcctgtgacggcttctgtgaatccgtttgaggcgacaaggccgtatgcgcccatttctgtcattttgagaatgtctaaggattttccggttttataggcatctaaagcatgttctgcggcaatgacggtttttccggttttgtaaatggcttttccgcctttgaaagcgcggcccgcccagccgacgaccggtatgaatccggcggcggccatcgctcctgctgtgacgcgttctgcggtggagagcttttctccggtcaccggatcaacgccttcggctgctcttttataatcataatagccggtgacttcgccggtaaagttgcagatgccgtcccatgttttttcgtaccatggtttattggcttcttcttcagccttttcctgaagccgtcttgcttcggcctgctgggcttttgcgtcaatatagtccgttccctgtttttctgtcgccgtgacgcttttgtagatttcattgctgtggaaggcttttttgtcatagtacataggggatgcgcttttcccgttgctggtggcctgcatgagaacagaatatttgctgagcacggcgttgtccagagattctaagttttgatattcagcagtcagggattcatcaagcgtatcgactgccgtgattgtgtcacgtctggttttctgggcatcgcccattttatcagcgtaatcatccagcgtatatgtgtcgagatgaataatatcgctgatgcctgacaaaattgaatcgatttctgctttatgagcggagacaatctctgaagctttcaaatccgcgttgggcagctcatgctccaaaaatgaagtctccacatatgtatcgctgagttcttgatctttaatgtcacctgaaatgccatttaaaaacgcaatttgagcagagacaagcgtcagccagctgtcggcgatttccgcttgtccctgaaaaaaatcttttatattgtctgcgcctttccctttcaaagcatcacctagatcggccacgccttgaaaggcttgtttgagcgcacgcagctgctcttcaagggcttcgtattgtttctttctcttatctgcttcgtccgttaacgattgtgattcaaacactttgctcatcggcaagtcctttctttcgttattttacggcgatcgcctcgtcctgttctttcaaagaatctacgttgtctttaacgtccgcgatattcttatgaacggcctgcttgtattcgctgatcatcgatacaagctttgcctcgcgggattggtacttggaggtatagtcgagcttgttttttccgtttgaaccggcgttcccgatcgaaacagcctccaaagcgctgctgacggattcaagctgcttcatgacggttccgtatttgagttttatttctgccattaaaaccaactccagcttcttttgattgattgtattttttctccgaccgtgtcaagggcttcttctcccagcgtcagcaggtgctctgcctctctcgcgatgcttctggcggcaaggagccctcctttttcaatttcaagctgtgtcatctttaagccgattcggtaaatataaccgtcgtatttgtctgtgacgattctgtatgcttctgtatgggcctgatcgcgccggtcatcaaattcttcagcaaaagtgccggtccaatgatggtccaggtgcggcctgaggatgtccctgatttcagatacgccctcttcctgcagagattctatctctcttttcgcttcttttaatttatcaatttggtgttcaacctcgcccagtttatggctgatcgtgctgttaatatggcttaatgtgcttgaatggctcatctgttttcacctcgtcttacgcaaaaagtcgtacaaaaagcacagacttttccatactatatttccatatattatattttaaaatagacagaaagcagcttaaataggttaaatggcttattttcaacagccgagatgctcatcattaacgccaaaagactcacataaacggcatatccattcatcgatctcctctatgtatccatgataaattccctaaaaaaaaggagacagtgattaaccgtctcctttgccttgtatcatgatcatcataccgtcgttaactgcagtcccagttgtacaaaacgtttgagaaatcttttctcttcaaatcttccggtctgataaagaaattggcgattcccacatctccccacatcgaatcaatgtcatcatctgaatcaatttgcaaaagcagaattgtatggttttgatgggagtaagaccgcggatcttcctgggtgaaggacgcatagccgccgattttatggccgaatgcgttcgccgtatattcgtcatacacctcatcgtcaaactgctcgaaatagtcaaaggcatccatcccggcatactgcctgaattgaaaatcagacgggagcacccattcagcagacagctcaggggtgatcagcgcttcggattgaatcggaaaatcgtactcctcttcaacctgaacgaaagaaaaatcatccatgagctccgcttcttctgctgtcacatgttcaaaatatttgacgcagaaacccgtttgcgcgcacccgtcgtcaaaattcagaccgtatacgtcatcactgaccgatatgtaaaactgaagaatgccggtgtccggaaaatcaggaagtccgggcatatccgcaaaattgatttgggcgagaagcttcatcggcctgccgctttcatctttaggatatggttcatgtttcggaaaataggggtctcctgcaattttactgtcataccgccccgtttcagcttttttgacgtgcagtttgataaaaggccgtgctgacgtttccagcagaccgcgggatgattccatttgcttcggcaatttccatgttttttccacgataaatatctccttcgtctctaaagattgtatgataaaaggccggcgcggtccgccggcctttcaagtgacagaatcagtctgaggcacgacggctcttcttccgattgagatatattccacgcccgcctgttccgcttcctcaagcgagtggcagtttctcccgtcgaaaataaccggggtttccatcagctctttgtacgcttcaagcgggaagtgtttaatttgttcccaatctgtcagaatcaggacggcatccgctcccctgacggcttcttctatggactcccgataggaaacttcagccggaagcagtccggaagcccggaatgaagcgatcggatcgtacgctgtcatccgggcgtcaagagccgccagacgatctgcaatgacaatggacggcgcgtcccgcatatcatctgtattcggcttaaaagacagccctaataacgcgatggtcttccccgtcacaccgccgagcctgttcagcactttatcaaccagcatggactgctggttattgttgactttaatgacggacttcagcaattcaaaatcatgctccacatgtcccgcgatctgcacgagggcgtttgtatccttcggaaaacaggaaccgccgtaaccgatgccggctcttaagaattgattgccgatccgtttatccaatcccattccgtgtgcgactgattccacatccgcaccgactttttcacatatatgagaaatttcattaataaaactgattttcgccgctaaaaatgcgtttgacgcatatttgatcatctcagcgcttctgatgtccgtatgatataccggaatcgcaagcggcccgaaaacccggtcaagcgtttcccgcgtctgccggtcttcagccccgatcacgatgcggtctccgtgaaaggtatcgtgaattgccgaaccttcacggagaaattccggattcgaggcgattgaaatattcacgtccgctttcagccgtgaatgaataacttcgctgatcctgtcattcgttcccacgggaaccgtgctttttgtcacgacgatcgcatctttacaaatatgttcggcaatccgttcggcgacattttcaatataagtaaggtttgcgtgcccgtcttctttttgcggcgttccgaccgctataaaaataacgtccgctcccgcaagccctttttcgtagctcgtttcaaatgccagccgatgccggccgatatttcgtttcatcatatcttcaaggcccggttcaaagataggggacaatccctttctcatctgctcaaccttacgttcatcaatatctatgcatgttacgtcatggccgatttctgaaagagacactcctgtcacaagaccgacgtagcctgttccgatcactgttattttcatcgtgttcccccaaccgtttagaaattgctgctgggcagcttaccgttattatcatatgatcccggcgccggctgaatgccggaagcctgaggtcatgataggaaaaaacggcgccggccgctgataatagcataagcataaaagaatcatcttgcaaaacagccgcttacgcttcatttaaacgggatggagacgacgattaaaaaagaccccagcgcttacggcgggccacaggcagcggaggttccttataaacggctttgttttcagcgagaagcgccgcattttccgcgagcatgtaaatcagctcagcccctgcttcttttttcagaacgccgagcgcctcctgataataaaaatttctcggtccgagattatgggcgtcagatgcgagaaagtggatcaaattcgcttcaatcagctgcagcgaaaaggatttcgctttccgaccgaatgctccggcaatgcagccggccgtcacttgggcggccgcccctttcttcacaagactgtaaaggacggaagggttttcgcgaatttccctgttccgctccggatgggcgatgacggggacatatccgttcagctgcagttcataaaacagcctttcagcgtaggccgggacatgatccgccggaaattccgccagcacatactttgtattatggagcgggacaagcgtgccgctttgaagacctgccagcagatctccgtctgttctgatttcctggccgggcagaacagtcagcggaatgccttccttgttcaaacgtttgtttaacaggctgaccgcttcgttgaccgtatgccggtccgtgtcatagcggtatttcacatgatgcggcgtcgcgatgatcgtatcaatcccctgtctgaccgcttctctcgccatcttcaggctttctgtatcatccgccgcgccgtcgtctatggaaggaaggatgtgacaatggatatctatcatatttcaatccctccttaaaaagaatggaccgcgcccattatgacattattgtccgtaataggcgtagtccgagtgtttcgtttgtttcttcccgttcatcacggccccaaggagcttgcacgggcagtaatcgagcgcttcttttgccttggccgctttttccttgtccgttttcccgcttgagatcaccataatggccccgtcagtgtagctgcctaatattttcgtatcggctacggccaagacgggaggcgtatccaaaatcaccttatcataaactgcggctgcttctgacagaagatctttcatggcacccgtcgataaaagctccgccggattgggcgggatcggcccgctcgttaaaatatccaggtttgcttcatcagccggcaggacggctttctgaaacggcatctgttttaacagcagtgacgttaatccggttccgttatccaatttgaaggtgaaatgaaccgtcggtttgcgcagatccgcatcaattaaaagcacttttttcccctgctgtgcaaatacgacggcaaggttggccgcggttgtcgattttccttcttccggaccggcggatgtgatcaaaagggacttcacctccgtatcaacggaagaaaattcaatgtttgtgcggatcgtgcgatattgttctgagttgatggatttcggctcagacatcgcaatcacgcttcgttttccgggtttgtcttttttacgcgtcaacatgtccgcccccccgcttgtttggtttccgccatcctcaagtttttggcaacgctgtctttagtactgattgaagtaaccgttcccaggatcgggatgccgagcagcgattccagctgttcttccgatttgatcgtattatccagatgttccagcaaaaaggcgagaccgattccgcccaaaagtccggcggcaaacgcaatcgcgatgttcagcttacggttaggctctgccggtgactggctgtccgccgcttcggcctttgaaaggatgctgacattatccacgttcataatggcggtgatcttgtcctgaaaaacggctgcaaccgcatttgccataacggccgcccgcttagcatccgtatccctcacggcaatcgtcacgacttgtgaatcctgctcgctggacaccgtgattttcgattccagctctttcgaagtcatggacagatgcagctgtttaatcacctcatcgaggatgaccggacttttgatgatgacattatacgtgttgattaattggaggttggtttgaacatcattgaattggacttctttttgattgtttttggattggctgaccaaaatttgagttgagttttcatagaccggcgtaagagcgaagaaactgatgagtccgcctgcggcagatgccgccgcggtaataataagtataaacagcagacgctttctcagtattgcgaatatttcctttatgcttgtagattctcccatataacctccatatcactttccgcgtattcccattccctccaatgatcttttccaattacgattatacagttttaaactgtcatttctaaccttttcaaatgacaaaattcgacaaaaatagacaatcacttcaatctgttttatttttgtaagcgctttaaatactggtgtcacaggaagattaaaaaatcccgcggccaagagcctgcgggattttatgttgcatatccatttttaatataagaaatcaaattctcaagcatttcttttgtggtcatctcagaggactgctcaccaatgtcgtgcgcatgcattaaaatcttcagaaactcctcttgatctaacttcgttttcttcatcattcgtttcctttcggcttccattaaattgaaaacaagattattatatgctgtcgggtgctgttttgcaatctctaatacatcattcgacactttcgggtttttatgtccttttttaggaaaaactttttccgggccatgtgttgcgatataatagaggaattggaatctttttattttgtgactcgttaggagcgataatcatgcttcaggatatgattgctaaagaagatgtgctcgcagcggctgaacagcttaaagaacttcttccttacaatgaagacaatgttcagctgatgaagaaagcactcattttatatcggcaggattccgtctatcgtatacaggttcaaaccccgacagagatttccgcatatgtgcaggatgttgtgcctgtaagggtcacgctgaacttatttttcatggtgaaaagcggctgcgcatgcccgtctgaggcgatctgccgccacgtgctggccgtttttctttacgtatatgcccaattcgagcgggtcggtacctttaccgaacattggctggaaagagaaaagcttgaggaaagcagggagcttgtccgccggcagtttcaggaaaaagtgctgccgaatgaagagtcgctgtcaagctggctcgctttttttgattcggaattctcgctgtgggaggcgcggacgccggccggaagccagacgatgcagggcctttattacggctatctgtcagcgctcaaaaaacacgctccgaaaaaacccgagcttaaaagcttatatcagattcattcggcgcttgccgtctggcttcacatgttcactttgattgagtcaggcagattggatgccgaaaaagattattacagcatcaatccatacgtggaacagctgatggatacgatttattcctccattgacagactgaaaacgtacgctttgtctttttcactcgatccctttttagaccggacgcccccggtgctccgcagactgcttgtgaaagaagagctttttcaatacgaacgcctccgggtattcggtgaaatgtggagcgcgcttttgaaccggccgaaatgggttgcgcgtgaacaggagattctcgaacaggaaagcgggcgccgtttttcgccggaagtgcggttcggacggcttcatctggcctttttgcaaaaaaatgatgaagcggtcttccaagatatgtcccgcttccctcctgaagcgctgccgtatacctttcaatggctcggtgaactcaccgcgaaaaaagactggaaacggctgaaagcatggtatggccggatcgaaccgcttgccgtgaactatacgaagcttgataagccgtttaaagaaatgcgcgacatcatcggagagctgtttgcgctattggcggattatgcgcggcactcacgggatgatcagctgtttgaacggtttgcttccggctgccttccctatacctttaccgaatacagccagtacctgtacgaaaaacggcggtacgcggagtgggtggagattcacagcctcgtcggtttttccgtctgggaaatcgaaaaggacatcctgaaggaaattgccgccagtgatccggaagcgctcatcccctcctatcaccgggcggcggccttttttatcgaccaaaaaaaccgcagcgcctataaagaggctgcgcgccatctgaaaaaactgcggacgctttataaaaaggcaaaaaaacagcaggtatgggagcggtatatcagccggctgagcgcaagttacaagaggctgcgcgcccttcaagaagaattgcagaaaggaaagttgattgatggcgagtcttaaggaaattttcattcatgtagaacaaatggaagattggacatttacgctgtcaagccatgatgagaaggagcagccgcttactctcagtcagatgaagactcatttgttccaatggcatgagtccaccttttacggaacgtttcttgaagacgtcagcttcatcggcaccccggccgttctgctcagcccgtggatgaccgtcgagctgctcggaaaaaactcgttcaattcattcagcaccgtgcagctgacaaaggaaacggaaccgttaatcgaagcggcttcgacgatattcgaatttattgccgacggcgattttcttccagactatgaggcttggcaaaatggcgtcctgcgcttcaaagaccgcgagcttttgctggaaggctttacggcagactggttctcagccgcggtccaggactacattcagtacaatgatgacctgctggaaaaatggcggcggatcgaaacccgctcaccggccgttcatacgtttaaaggctcctttttggatgaagatgattttctggagggaatcggctggcatgacgatctgacgccgtttaccgtcgggctccgattaaacgagcctgatttcgacggtgacgactggaaaatcgaaatgtttttacgtgagaaaaaaaccggctccatcaccttttttgacggactgaagggactgaaaaaagcgtggcaggcatacagcggaaaaatcgcgcgcgaacaggaccgcttccgcagaacggttccctggctttcgtttgattcaggaacgacgctgatttctgaagaagaggcttggatcttcttatcggaagcgagtgagacgcttgtcgatatgggtgtggagattcttctcccatcatggtggcagattgtccgggacagcaatatgatgctcaaggcgaaagtgtcatcctcgccgcggggcgagtccttcgtcggcatgaacgctctgcttgatttcaactggagattcgccacaaacggaattgagctgacagaggatgaattcaatgagcttgtcgcaaacaacagacgtctcgtcaacatccgcggccaatgggtgaaaattgatcctcaattcattaaacaaatgaaaaaactgatggaaaaagcggaatctgagggcctccacatgtccgacgtgctggcgcgcgaactgatggatcacggggaaaacggagccgaggacacggacatcattgactcatcggcatttgccgggatcaagatcgaattatcaaagcagctcagaagcctgatccgcaaactgacggatgcccgggatctgccggagcatgaagtcagcgccgcgtttcagggccagctccgcccttatcagatgtacggcatgaactggcttctgtttttacgggaaaacggcttcggcgcctgtctcgcagatgacatgggacttggaaagacgattcagatgatcgcttattttctccatgtgaaggaaagcggccggcaaaaagcgcctgccttaatcattgcgccgacatcggtgctcggcaactggcagcgtgagctccagaccttcgcgccgcagctgaaggccgtgcttcattacggcccccgccggccgaagggggaagcatttgtcccggcctatcaggacgcggatgtcgttcttacttcttacggcctgtcgcacgccgatcaggaagagctttcttccgtgacatggagcaccatctgccttgatgaagcgcaaaatattaaaaacgcgcatacgaagcagtcccgcgcgatcagaaagctgaaaggcgtccatcatatcgcgctgagcggaacaccgatggaaaaccgcctgacagagctttggtcgatctttgattttatgaacaaaggctatctcggcagtctgaccggctttcataaacgctatgtgctgccgattgaaaaagaccgtgacgaaaaaagaatcaaccagcttcagcagttaatccggccgtttttactgcgccggacaaaacgggatgaagaagtggcgcttaatcttcctgacaagctggaacaaaaagagtttatcccgctctcagccgaacaggcatccctttatgaacagcttgtcaaagatacatttgaacatatggcttctctgaccgggatgcagcggaaagcgctgattctgagcatgctcggccgcttgaagcaaatatgcgaccatcctgcgctctatttgaaggaagaacagacagagctgttaaacgggagatccgtcaaactggaaaagctgcttgatttaatggcggtgatccgcggacaaggggaaagctgcctcattttcacccaatacattcagatgggcaatatgatgaagcgcctcctggaaaaaacattcggagaaccggttcagtttttaaacggaagcctgtccaagcaggaacgcgattctctcgtcgaacggttccagaagaaagaatacccgacgctgattttgtcactgaaagcgggcggaaccggcctgaacctgacggctgccaatcatgtcattcactatgacagatggtggaatccggcggtggaaaaccaggcaaccgaccgagcctaccgaatcggccaggaacggttcgtccacgttcacaaactcattacgacgggaacgattgaagaaaaaattgatgccatgctcgaaacgaaacaaacgctgaacgatcagattatccaaagtgaaaattggattaccgagctgtcatccgctgagcttgaagaattattcaccctcagcgcatcggcgcaatcacattaaacgcaaaaaggccggctctctcagaagagccggtcttttatgtcgtccttactgttacgccgcatttgccatgaatgcgtcacgccagtcatgaacagtatcgccatacctttcacagtaaattcctgatcatatgcgcaacgccgttttgatcatttgtcaatgtaacggcatcagcgatctctttaatatcttctctcgcattccccatcgctatgccttttccggccgcctgaagcattgaatagtcatttaagctgtcaccgaccgcggcggtttcagccatcggaatgccgagcttttgcgccagccgtttgagcgcctgccctttagaggcgtttcgagacgccagttcgaagttgtggtcggcagagctgacaagggtgagatctttctgaccgctgaatcggtcccagcccgctttcagcttccgctcatcaaacgaaaatccgagaatattataaaaatccagatgctcttctttctcaaagagctcacggtatgaatgaatgtaagcaaagccggattggctgtattgcactgaagccgcctgttccaaaacggaaagatcggcttcaggattggcgcttttcacccggtccatttcgatatcgagcagctgcctgccggtttcaggcgtatagatggctttgtttgtaaacacctcatagtaatattgattctcttcaagccatgacaaaatcccgcgggctcttgtttcttcaatcgcatcacagtggtacaggctgccgtcaggagcataaatggcggctccgtttgcgctgatgacccacgtttttatgccgagcggttcgaatatggagtgcacgtcaaaatgcgcgcgtcccgtggaaaccacgatttcaattcccgcttgccgggcttcccttaaagcccgctcattttcatcgcttacttgatgactgctgttcagcagtgtgccgtccagatctatggcaatcagtttcacatgtcctcatcctcttcttcagattcagttacaagcaattctacgccgtgccggtcgagcagatcgcaaaaatcctgatcaggcagccgatcggtaatcagcaggtcaacctcgtgcaggtctgcatactgataaaaactcgtacggccaagcttggagtgatcgctcagcgcaatcacctgttcagcctgtcggatcattttacgctttaccatgccgtcttcttcatgcggaatcgtcaggccgttttccgagatgccgacaacgccgatcagcaccttatcggcgtgataatcccccagtttttctacaacggaagccccgtataaaaaccggtgttccttctggagctttccgccgagcaggtgaatatcaattccctcttttgcggaaaggatatcggcctgattgatcgaatttgtaataacagtgcagccggtgacatttaaatgctccgcgcaggcctgcacggttgtcgaagtgtccaggatgatccggtctcctttatggatcagggatgcggccagcttgccgattttgtttttctcttcagaaacggttttcagccggcccgaatagcccggaacttcctgattcaccgacggcagaatcgcgccgccccgtgttctgataatggccccgcgctctttcagctttacaaggtcccttcttgcggtatctcttgaaatatgaagcagcgaacatatctgttcagcggtgatccgccgatgctgtttcaaatattccattatcgcaatcagtctttcttcttgatacacgtcctcattccctttttcgtcacttatctgtaagtaattataagtttttatcccaatatattcaatgtttttaagtattcataagcgaaatcacttctttttaaccattttttagctcccgcacaaaaaaaccagtctttcgactggcgagtgggaaggaggtattgcggggcccgctgaaaggcgggaaatcgaggaaaaaagcatgctattcagccagcggctctttccgtttttgatccataaaccgaacggtatcagccatgacctcggtcacataaacttttacgccgtctgtcttttcatagcttctcgtctggattctgccgcttacaccgaccattgaccctttttggcagtacaatgccgtgttttcagcgttttttctccagatggtacagttgacgaagtcggttccggtttcacccgacgcgcttttaaaattgcggtttaccgccaacgtaatatgtgcgacgggaatgcccgctgctgtaaaacggagctccgggtctttcgtcagccggccgacaagcataacgtggttaaacaagccgtatcctcctctctttttcgaggctggcttcattgtagtacaagggctcgtgaaagcaaaaagcggataaagccgttattcgttcaggctgctcttatgttttcgtttttctttctgataaaaaaaacttttgtttttggccgcttatgtaatatgtatttttgagcagccgcgagaaaagtttcgttttgagccagtctttctcaaacatgcggacaaactttccgccgtcccatgcgaaccagtaaaaactcagctttttatcagtcagtgaaagctgaattttatactgttccatgcggtcttttgtttcatataaaaagacgacatttccccttctgttaagatgcacctcacaatcttcctttttgcataccaagtaggaatgatcgtcttttcgccttgaaccgtcttctatatagatttccttcaggcgcaattgattcataagcatctctccatgaccatattcttttacattataatgaaaaaatagaaatgattaaatgttgaccgcctacaaaaatgatgaagcatgtcttacagcattttcccgggaaaaatgatatgtgttataataaatgaacgaaacatggacaacaggggtgaaaataagagatgaaaacctttaaactggttgatctgaatgtggaacgtttagataaagacgatcagccgattgagcagtttccccttttagacggattgattatcaacaaagaggacggagaaaatcactggttaattgaagcactggtcccggccgaacacttttctttttttgacatgctgatgaaaagccagaaagaagcgaaggtgtttgtaacgattacgaaaaaaagcaaccgccccgcccagctgacgggaagcatcaaaaatatcgtcgagctggaaagaagtatacaagttttaatttacggtcaaatggtgtcaagaaaccaccccggatcagaaagcattctggagtcgctcgtgaaagaaggctactcgggcagccggctgattgaagcgtttaaacaaaaattatgatcatgaaaaaggccggacgttaatcatccagcctttttttgtgccctagtcattgtgaggagcccgctgtttcagcagatctctgatttcagtcagcagttctgtctgctgatctgtttcctcggcttcttcagcctcttcttctgcttcttttttacgtctcagcttgcctattgtgcggatcacgataaaaatagaaaatgaaataatgaagaagttcacaatcgtttgaatgaagcttccgtacttgatatgagcatcgccgaatgtcacggccagccctgaaaagtcaagaccgccaagaagcagtccgacaagcggcatgatgatgtcttcaacgagcgacgtcacgattttgccgaaagcgccgccgatgacgacaccgatagccagatccatgatattgccccgcatcgcaaagcttttaaattctgaccacatcacattcacccctttctatacaaaatgggcttttttataagcccatttgtttgcttttattctccgagcgcaaaagttaattcagcttcacacacgagctcgccgtcaactttggcaacgcctttgccgcgtccgatcgtaccgcgcgcgcgggtaatatcaacctcaagctccagcttgtcacccggttttacctgctttttgaaacggcagttatcaatccccgcaaaaaatgcgagtctgccccggttttcttctttaatcagcatcgcaaccgctccgacctgcgccaaagcctctacgattaatacgcccggcataacagggtattcaggaaaatggccgttgaaaaaatcttcattcgccgtcacatttttatatcccgccgcccgttttccttcttcgacttccgtaattctgtctaccagaagaaacggatagcgatggggaataatttctttaatttgctgagtatcaagcattctcttgacatctccttcatcgacaatagtatgtatagaaggcatatgtggcaaccaatctgtacatttggaagtatattatgaatcaatttctttttcaaccgcgctgtaaactgtaaccagctggcaatgagcctcgtccattaatgtgttatgataaataaagacttttaccctatgcaaagaggttggaagatgattgctaagtttactgaaaaacgtacgctggtgatgctgaatgagtggtatgacgccatgggaaaacgccaattcgatctagcccgttcccttcacgaacaaatcaatcagcatctccccaaattacaaaagaatgcaaagctcaaactcagatatcagctgtttttcgcacggtttcagctgctgtttgagaaaaaagacggtctgaataagctgttctgcgagctgaagcggcgcaaagatgagatggatcatgaattaacttattatttctattttttcaaagggttattccatatggtgaatggcgctccgaaccgtgctgtctgccgctttaaagaagctgaacagtacctgccggccattcaggaccgtttcgaagccgctgaattttattataaaacagcgggtgcatattacatgatgaagtcgcctgcgctctccattcaatatgtcaataaagcgctggaaatctatcaagatgaagccggctacatcaaaaaaacgctcagctgccggctgcttctcgccgtgaattatatagacgaggcacgctatgacgacgcagaacagctcttcaatgaatccataaagataacggaccggatcaatgacaataacctgctgtgccacgcctattataattttggttttttaaagaccgcccagaaaaaagataaagaggccctccctttttacaaaaaggtattgggcaatcagcgtttcgagaaagagtctcccgtttcctaccttcattgtgtgtacgaagcggtcagagcactttttaaaaccggctctgccgccgaaggacaaaccgtgctgcagaaaggattatacatatctgaaaaagtgcagaacaagattatgaaattgaagctgaccgcgctcaacatactgtacaccgctcaggaggacccgtacgaccgattgcagaagcttgtgctggagttgcagaaaattgaagcgtgggtggatttggaagtgctgcttcaggatattactgattactacaaaaaaaagggcgattttgagaaagccgcattttttatcatgcgcggctgatcaaaacgccccttcttttatctcactgagttgattaagcccagcatttggtctcccaatgtaatcgtgcggctgttcagctgataggaacgctgagacacgattaagtcggtcatttcttttgacatatcgacatttgaaccttcaagcgcgccctgctccatgccgattgcctgccggtttgcgccggtaagctcttcaatcgctgaagcccccgcgccgtttacggaaaacagattatccccttccgcatgaagcgcctgcggattattgacattgacgatgccgagattaaacgtctgcgaacgggttcccgcctggtctgaagcagtcagcgttccggttttgctgattttcagctgagtcagcgaactgtcaatttgtatgggctgaccgttctcatcgagaatgggattgcctcccgctgtcatcagctgaagcagccggtcatttccgccggccggcttgagggaaagtgagccgtcccttgtatacacccgccgtccgtccgcttctgcctgaagatattgataaggtgatgtgaacgcgatatcaaggtcacggtcggtttttttgatgcttccctgccctgagtccagctgcggagtcatgaccgttccggcgccgagacgcagaccgggcggcgttttccgcatgttcggcgaattttcctttttgtcatctatatggtcatactgctgtctgatcagctcggaaaagcgggagtccctcgctttatagcctgtcgtatcactgtttgaaaggttgctgctgactgtatccatctgctgctgaagctgatgtaaggctgttgaagccgtcagcattgatctgagcatcataattgaatgtcccccattttgttacactttgccgatttcatttgcggctttatccatgcttttatcgtaagcctgaatgactttttgattggcttcaaatgatctgtatgcttccgtcatttctgtatacgtgctcgtcacgtccacgttcgaaagctccgagacgccttgctttaatgaatacgagacttggggattcgccgccgcgctcggcagttcagagccgtcggccgtgctgtataggtcattgccgtcccgtttcagattgcgcacgtcttcttccattctgatatcaatctgccccgccggccggccgtttgtcgtgaccgttccgttttctgatacggtgaatttttcattgtcgactgtaatcggctgtccgtttgttgataacacaaggtttccgtttatcgtaagctgattgttttcatttaatgagaaagtgctgctttttgaatagcggacgccgcctgcggtctgcacgggataaaacagctcggcgttttcattcgtttcggcattcttgggaacctgattctccatcagcgcgatatccgtcggctgatcggtcgttttcaggcttccctgcgtaaacaacggtttcagctcctgcatgtatacgcctgtgttgacggaaccgattttcgtttttttatcgccttctattcggctcagaagcatctcgggaaaggcgcggattgaaccttgatcctctttgtaccctgatgtattcgcgtttgcgatgttatttgacagcatttccgttcttctctgctgtgtaatcattgcggacgttgcggtatataatccttttaacaagtcttccacctctgaaatagcattatttccagttgcctcaccggaacatttgttctataatgaaaatcagcattttttcttattatcggatttacattcccgttcgtgaagggtttgacagaaaaaaaccccattctttttcagaatgaggttttatcatcagctcagtttgcgttttggaagcttgtccatgttatccagcatgacgccggttccgaccgcaacacaatccatcgggttctcagcaacaagaacaggcaccctcagctcttcggcaagaagctgatcaagcccgtttaacagcgctcccccgccggtaatgataacgccgcggtcgatgatgtcagcggacaattcaggcggtgttctttcaagaacctgcttggcggcctgcacaatgacggcaactgattcacgaagggcttcttctacttctttgctgtttactgtaatcgttctcggcagaccggaaaccatgtcacggccgcggatggtgatttcttcatgacgtgcgtctgggaaaaccgttgcgaccttcaccttaatatcttcagcggtacgttcaccgatcagcagcttatactcgcgtttgatataatttaagatttccatgtcaaacttgtccccagccatcttaatagaagaggaggtgacaatatcgcccatagaaataactgcgatatctgtcgtaccgcctccgatgtcaacaaccatgttaccgctcggctggaagatttccatacccgcgccgatagcggcaacttttggttcttcttcaaggtacacatgctttccgccgcttttttcagctgcttctttaatcgctttttgctcaacggatgtaatattcgtcgggcagcagatcagcatgcgcggttttgagaaaagtccttttacattcagcttattaatgaaatgtttcagcatggcttctgttacttcgaagtctgcgattacgccgtctttcagcggacggatcgcaacaatattcccaggtgtacgtccaaccattcgtctggcttcttcaccgacagccagcactttgccgctgtttttatcaagtgccacaacggaaggctcattcagaacaattccttttccttttacatggatcagtacatttgcagtaccgaggtcaattccaatatcccttgcaaacatctatttatatcctccttgatatctgtttcacagtaaaatatccacattgtgccctaattatatatattatcataatttatcaaaaaaaagctgctgaacgatataagttcttgacaaaattttgcggatattcgcgaaaccgcccgggaggagaaaaaagggcccggcagacgtcaggcgctacggctgctgaacgggctccccttcaagaatttcatccttcttgtactttagtttcgtcgcctctccccctcttaaatgtctgatggatttatgataatcgagtatttcttttacttcattcgccaagtcaggattgatttcaggcaggcgctctgtcagatctttgtgtacggtacttttggaaacaccaaactctttcgcaatgacacgaacggtttttttcgtctccacgatatacttgccaatcttgattgttcgctctttgatgtaatcgtgcacaccactcgacctccccagttggatgtgagaagtgtgaaatgagatccgtattctgtaacagattcactgatgatgcagcttcttcgttgtccgattatataagaaggttttagaaatatgcccacgatccctcacctcaaacactctctttgataggtttgtaacagtgtattagcaatgaattgggaatatgctaaaaactcaataaggacaaggggcgggtcataattttctgctttttgatcggggggtttacatccgcgcgatcctgctgtagaatgaaacagcacaattagttacttaggtaagttttttgaaaaggagaacggaaatgatccacgtcaacagacgcctcattcaccaaatcaatcaatgcgcccgcctgattacgaagaaagccaatgaacggctggaaccattcggcctgtactcctctcaatggtcaatcctatattgcttaaaaacgatcggaccgatgacccaaaaagaaatctggtcctatctgaacgtagaggcgccgaccgttaccagaacgatcaaacgccttgaagaaaacggctggattcagcgggaacagggagaagacaagcgggaaaagctcgtcgtcctgacgaaggaagctgaattgaaatacgacagcatcaatcaagagatgctgaagttcgaggaagacatgcttgcggatttccaagatggagataaggaagctttttctgagtttctgaatgtgtttttaacgaaatagaaaagaaagggaagtgctgtacttttgagtaaatctgactcgatctggaccaaagattttattatggtcgtactcgtgaatttatttgtctttgtgttcttttatacatttttggccgtgctgcctatctatatgattcaggagcttggcggcagtgaatcgcaaggagggcttttgatcagcctgttcctgttatctgctattatcacccgtcctttttcaggggcgattattgaacggttcggcaagaaaagaatgacgattgtatccttggcgctgttcgccctgtcttcttatctgtatttgccgctacacaatttctatctcctgctcggactgcgttttttccaaggcatctggttcagcattttaacgacggttacgggcgcaattgccgctgacattattcccgccaagcggcgcggcgaggggctcggttattttgcgatgtctatgaaccttgccatggcgatcggtccttttctcggactgagtcttgtgaaagtcatttcgttcccggttttctttacgatttttgccgtatttgtttctttaggcttgctgattgcttttatgattcgtgtgccggatcaaaacaacagcggaacgactgtcttccgtttttctttctccgacatgtttgaaaaaggcgcgcttaaaatcgcgattgtcgggttgtccatttctttctgttattcaagtgtgacttcatatttatccgtttatgccaagacgatccacctgttggatgtcagcggctatttcttcgtctgtttcgccgtgacgatgatggccgcccgtcctttcacaggaaagctgtttgacagagtggggccgggaatcgtcatctatccgtcgattatcgtgttctccgcggggctttgcatgctggcgatgacaaacagcgccctcatgcttctcttgtccggtgccgtaatcggtctcggatacggctctatcgtaccgtgcatgcagacgctggcgattcagaactcgcccggacaccgttcaggctttgcgacggctaccttcttcactttctttgacagcgggattgccggcggatcctatgtattcggcctctttgtcgcttcggccggattccattcgatttatctggcagcggggctgttcgtcctgattgctttgctcctgtatggctggagccagaaaaaaagaacgccgcttgaagcggacggaaacgtttcaatcgcagactgatatgacaaaaagccgggggcagcccccggctttttttattcggccgctctttcccgcacgattcgtcccgccgcttttacataaggaggatgaatatacataagcgccgtataaccgagacatgacaaaatgacacccgcaaaccaggagatatcatagatgccggcgaacgccgggacgtacatcccgattaaagaaataaacgcgccgagaaaagtcgcggcaaaggcccggtaattatagcctttgtaataagtgtactgtccggtttccgaataaaggtcttcaactgagagctgcctttttctgatgataaaataatcagccatcatcaccccggccaccggtccgagcatcccgccgatgagcccgagaaacgcataaacattcgtggcgctctccatcagcttccacggtattgtgaacagagccaaaacggcggccaaataccctcccctcctgaatgtaatatacttcggcaggacattcgccaagtcataggccggtgacacgatgtttgccgccacgttaaccgagacggcggcgatgcaaagtgtgatgaccgaaagagcgataacaaaaggattatcaaaccgggccaaaatctccaccacatcccaaatcggttctccgaatgctacttgtgatccggatgtcaccgtgatgcttgcaaacgcgaacagcgcaaacgttcccggcaggccgtaaaactggccgcgaatctgttctttttgcgacgcggcgaaccgggtgaagtcagggatattcagaatcagcgtcgcccatattccgataatgcccgtcactccggcggcaaacggccaaaacgcttcagaaaaggtgtggaactttcccggctgtgagtaaatcggtccgagcccgccggcaatatctatcgcccaccagaccatgccgccgaagacgagataaacaagcgggcccgcccacacttcaaattttttgattgattccatgccgtgccgcagtacaagcagatgaatgccccaaaagaaaatgaacgacagaaagcccggcaaatgaagcccgaatatattccaatctccgccgagactcccccagcccggccatatgttcaaaagcagaatgtgcaaagccgtgctcccggcaaatgtttgaattccgagccacatgatggctgtaaacgccctgagaagcgccggaatgttagcgccgtatattccgtaagaagccctgataatgaccggaaaaggcagtccgtatttcgttccggcatggccgttcaaggccaaagcggcgaacaaaatgagtgacgccgtcacgataatggcgagcacctgccacggagaaaggccgatcgcaatgagcccgcccacagtcgcgtaggtcgggatattatgaatacagcccatccagatggatgcaaaattcaccgctttccatgtccgttcgccgtcttctaaaggcagtaaatctttgttgcttagccgatcactcgttgtttttttcattttctccctcccgcatgtgcgttttccttacatcacatgtgaaaaaatataactgaaaattccgtaaataacattggtcgctgtcgacaataatcgttttgatttttgagcacattacacaaaaaaagagacggggagagcccgtctctttttttcgcgcctgttaagaggcttttttgaggagaaccgaaaaccggaacgccatcaaaaggcttacagcgccgacaacgataagaatcgtcccaagcatatgaaaatggccggcggtaatttcttttccgaaaagaatgcccaaaatgacagaagacaaaatcgagccgagataccggcaggtctgaaacaggccggacgttgttccgaccatgtcggcggggctcgttttcagcatggccgcctgaaacgtgacatttccgaagccgtagccgacacccagcacggacaggatcagcccttttcctatcatgggcgcctgaagaaagaaaaacgttaacagcaccgccccgatcgcagtcaggcaggttccggcaacaatcggctgaagaagccctttcttatctatccattttccggtcagaggcgacaccagaatactcatgcccgacataaacagcataatcaacccgcttgtctgaacggacaaatgcatttcatcctgaaaatagctcggaagcccgaaaaagatgcagtaaaagaatatattcagcaaaataaattgaatatacaccgacgatagtttccgatgcgttttaaacagcctgacatcaataaacggcttctctgttttcagctcgcgccagataaacagcccgacaaacaaaagcccgaatacgccttctgtatagtgaggcttcgtactgaaggacaataaaaacgacaggagaaggataatcgctccggcaaacaggagtatcccgatcgtatcaagctggcggagcacgcctttcaagccgccgatctcgcgtttttcatctttcggaaacatatacattccgagaaaaaagctgagaatgataaacggcagattgacgaaaaagattgccggccaccctccccaaacgatcagaaaaccgccgagagtcggaccgagcgccgtcatggctgatgcaaagattgacaggacggccagcgccgaagcctgcttctcctgtatattggaacggatcaatccgacgccggacggatatatcgcgctgcttccgatcgattgaaaaagacgcatgatcagcaaagtcataaaagtcggcgcaaacggcgcgccgaccgccgagacggcaacaagcagaagcccaatcaaaaacagcttcttcctgccgagcatatcaccgagcttcccggtaacaggctgcgccaccgcgctggccagataaaaggacgatatcagccaggacaccgttgtaaacgacaggtgaaattcatgctgaatactgtgaagcgcaagagaaatcatcgacgagttcaatgggttcagcatcgtccccgaagccacggccgtcaagaacaggacgcgtctttttttggagattgtcattttgtctgtgcgataaattcttccgtcgtccggcttctgccgattttcgggaagataaacttgagtgtcgcttcgtgctgttcatcgctgaatgtcgccatcgcgtcagttacgaaaacttgctgatacccgagctgaaaagcttctcgcgccgtgctttccaccccgatgtttgtcgcaatcccgcataacacaatcgtgtcgattccccgtcttctgagctgaaggtccaggtccgtgccgaaaaacgcgccccactgccgttttgttaccgtataatcgttttctttcactccgatgtcaggcacaaattcagcccagtccgccggcggagccgaatggcccgccgcctcttcatccgtcagcggcttcagcgcatccgctccgtcatgaaaatccacgttcacaaagctgataaatccgcctttttcccggaacacatcaattaattttttcgcgttcggcacaacggtaccgcttttatcaatcggcacaatgcctttttgtaaatcaataaggaccaaagccgttttttcaaattgcagatttaatgatgttgtcataatgattcctcctgatgcagttagtgtttctcaccccgtttattttactctttcccggacaggatttcttccgccgtgctccggcgctctttttatggatataaagtcgcacgacacccatttgaaaaagcagcattatgaacgcaaaaaaccatgtcagataaccttacacgaaaatgttttatcgttcttttttctctataataatgaattaatcacaattacattctgaatgatacggaggaatacaacatgcagatgggcgatacagtatttatgttcttttgcgctttactcgtgtggctgatgacccccgggctggctttgttttacggcggaatggtaaaaagcaaaaacgtgctcagcacggcgatgcatagtttttcttctctcgccatcgtatccgtcgtttgggttttgtacggatattcacttgcttttgcccccggcaatacatggcttggcgggattgaatgggcggggctgaagggggtcggctttgaacccggaagttacagtgatacgatcccgcattccttgttcatgatgttccaaatgacgtttgccgtactgacgactgccattatttccggagcatttgctgaacgcatgagattcagtgcttttcttgtattttcctttttgtgggcttccctcgtatatacgcccgttgcgcactgggtatggggcggcggctggatcggccaaatgggcgctcttgacttcgcaggcggaaacgtcgtccacatttcttccggagtcgccgggcttgtgctggcgattgtgctcgggaaacgcaaggacggcacggctgcttcgcctcacaacttaatttacacgttcttgggcggagcgctcatctggttcggatggttcggcttcaatgtcggaagcgccctcacgcttgacagtatcgcgatgtttgccttcattaacacaaacaccgcggctgcagccggaattatcggctggattttaatcgaatggatgctgaataaaaaaccgaccatgctgggcgctgtatcaggcgctatcgccgggcttgtcgccattacgccggctgccgggttcgttacgccgttctcttccattgtaatcggtttcatcggcgggcttgtctgcttttggggcgtttattggctcaaaaagactttcggttatgatgatgcgcttgacgctttcggcctgcatgggatcggcggcacatggggcggcatcgcgaccggtttattcgcaaccacttccgtcaatgacggcggggcaaacgggctgttttacggcgatccgggactgctctggaagcagattgcggccattgcggcaacctatgtatttgtatttattgtcactttcgttatcattaaaattgtaggtctgttcattccccttcgcgccagtgaagaagaagagtcacttgggcttgatttaacgatgcacggggaaaaagcatatcaggacttataaagtgaggagtggcttagatgagcggtcaaatgttcaaggtagaaatcgttacgcgtccggctaagtttgaaacattgaaacaggaactcggtaaaatcggagtcacatcgctgaccttctccaacgtacacggctgcggccttcaaaaagcccacaccgaactgtaccgcggagtcaaaattgaaagcaatgtgtatgaacggctgaaagtggaaatcgttgtcagcaaggtccccgttgatcaagtcgtggaaacggcgaaaaaagtgctgaaaacgggagagcccggagacggcaaaatattcgtctatgaaatcggaaacacgattaatatccgcaccggagaagaaggaccaggagctttataaacaggcagaacgcccggagacagaaatgtcccgggcgttttttctagcttcattaaaaagaagaaacctttttttcatgcgggacaggccgcttatgccgtacgggttgttttttcgcatatgtactgatattgaccagtatgccgcacaaaaacagcgtcataattaatgaagaaccgccgtagctgataaacggaagcggcacacccgtaaccgggagaagtccgctcatcgctcccaaattcaatacaacctgaaacattaattgaaacgtaattccgatggcaagaagcttcccgaacgggtcatcagcccgcacggccgtttttacgccgagaagcattaacgcaaaatataatcccaaaacgatcagaacaccgaatatccccagttcttcgctgatcacggccataatgaaatcggtatgcgcctcaggcagatagttcattttttcaacactgtttccaagccctcttccgaaaaacccgcctccggaaatagcaaaataggattgaatcagctgatagccgtccccgttcgcgtcaccaaacgggttggtaaaggaaacgaggcgcttcacacgataggaagcggaaaatgcgagataaacaaccccggacaccgccgtcgcgccgagcacgaacagatggcgctttttcaagccggcacataataaaatcgacccgcacgccgccaggattaaggaagccgtccctaaatcaggctccgccaatgtcagcagaaaagcagttcccaaaatcactaaaggcggcagaacccctttcacaaattgatgaatgtacggctgctttttcgtataaatcgaagcgaaatacaaaatcatcgcgatcttagccaattcagacggctgtacgacaagcgggcccgctcccagccacctgcgggaaaaattccgctccagcccgattcccggtatcaatacgagcagcagcaataccagcgaaccgaccacaaacagcggtacaagccgcgcataccgcttatacggcagacaggcggcaaatagaaataagcataatccgatcagtaaagaggtactttgtttatggaagaaataggatggatctccataccgctgagaccccatcacatcactggcgctgtacaccattaacaagccgaatccgcaaagcagcataatgacaaacacaagcggcagatcggcgtttttcaaacgtttcagcaacggacaaaactccttcggctattcttttcccgcatacttgacgcacagtaatacagtcacgtttcattctgtttacttttttatgattatttttaataccaattgtgtctcatagaaaaaagcattacactgttcatataaaataaagataaaaggtgatatttgtgaattacgaactatttaaagcgatcaatggtttgtcgcaccatagtgccattctcgactctatcatggtatttattacggaatacgccatttacgcctacgcccttttcctgcttgccatgtggctgttcggaagcacaaaaggcagacaaaacgccctgtacgcgggcttcacgggtgttgcagcgcttatcatcaactacctcatcacgaaagtctatgtcgagccgcgcccctttgtcgagcatacggttcatacgctgatcccccatgccgcggatgcttcatttccgagtgaccatacgacaggcgctttggcgatttcaattgcgattctgttccgcaacaaaaaactcggctggccgcttgtgattttcggccttttgaccggcttctcaagaatttgggtcggccaccattatccgatcgatgtgctcggaagcattatcgtttccctcattgtcggattcctgctgttcagattttcaaatgtgcttcgtccgattgtcgatctgatcgtgcgaatctatgaaagtatcgttcataaaagcaaatcgacaaaccataatatataaaaaaaaaagccggcgtctgtcacagactgccggtttttgtatgtttggctgtgtgctttttcctttgtaaagcacaaaatgcggcaatgccgagactgtcaatcagcacatcgcggaggcatccgtttctgccgaaaaagagctggacgatttctgtcaggaaagcggcggccaatgcatacagcaccgccctcttcatgcgcctgcgctccctgaaaaacaaataggcgagcacaaaaaatgaaaacgcgtgcccgagcttttgaatcgccgcttccggtatggcgagctccgccatatcgaacacaaagaaaccggacacatccggatgcggcgtgaaacggaaggacaccgtctgcgacacaatcatatcgtgaaagctttccgtcaaagccgaaacgaaaacaaagacgagccacccggccgccagacatttattcattcagcatctccttctttttctactagtataaaggcacatgcgggaatatgaaaagcgcctatctgagctgataggcgctttgggatcaagattacttgcccgaatctttcattgagccgtcatctttaccatctgtcttgtcttttgtgccgtcctctttgtcacctggtttttcttcggtttcttttttaggcgtcacatcttttttctcggaagactgctgaattgacccttccgtttcttctgtcacagcgtttttctcttcagccgccgctttttcaatagatgttaccggcttgtccataaaattgagcgggttcatcgctacgccgtccttgcggatttcaaagtgcacgtgatttccgctttcttcactgtaaaggttttttccggatttaccgatgacctggttctgctttactttgtcgccctgatcgacgctgacttcagataaagactgatagacagtagacaggccgtctgagtgttcaatttcaaccacatatcccagtaccgggtctttagcagctttaacaaccgtaccgctcagagaagcagaaacatcaaatgattttccgtctttctcagctaagtcaattcctttactgaggctgtacgtgttattatagttaacaagtgctgcttctttctctttttttgcggcatcagtttcataaaactttttcacaacagaaacattttcagaatgagcagccggcattgcgacgttttccattgacttgcctacttcgacggcatcgtctttgccgctgtcatacgcggagtttccgccgttgttcgtcagattgtccttcacatcattcgaaacggattgataccaaaggacagctgttaaaatgacggccgcactgactaagtagattgcagggaatatccagcgtttacgaaaaaaccgctgaagttttttgacttgagaagttttcttttcttcctctctcatttgttcatcacctcagcaacattctgaacacttttctgaaaatatatacacattcataaaaaacttttttggaaatagtatgtgcagattgcacttgattatgtaataaaatgtgaagggagatcccggaatatgaatttgaccctgcgcaaagccgtattggaggatttagatgcggtggtggccatatacaactcgacgattgcctcacgaatggtaacggctgatacggaagaagtgacgcccgaagaccggatggattggtttttgcggcacacggaccggcgcccgctgatggtcgcggaagatgaaaccggcaaagtggcggcctggatcagctttgaaacgttttacggccgtcctgcctatgacaaaacggcggaaatcagcatctatctgcatcaggattgccgcggcaaaggagcaggaagctttctgctgaaagaagccctggcactcgctccggcaatcggcatccgcagcctgatggcttttatcttcggacataatgtgccgagcattaagctgtttgaaaaattcggttttaccgaatggggcgtattcccgggtatcgccgaaatggacggaaaacgatatgacttgaacattttagggagagaactgtcatgatcaccatcgataaagacaaagacgaaaaccagccgctcaataaaaaagcccgttcccttgccgacatcgccaaatggggaaagatcaccgccgtgtttctgatcatcacgggctctctttccgctctgtcagccattgtgacgctgctcggagccattccgggggttctgctcatcatttccggcgtcatgctgatgcgctcggcaaaagcggctgccgcccttcaggaaggactagaagaaaacgcggaagaaaatatgcttgcacattacgcgtcatttatcaaaatgcagtttttttacgcggcatccagtgtggtattgggcattctcgcttttattttagtcgtcatcttcgctgtcatcggaattatcgcttatcacagcactgatacgtatgacacgcctgattcatattactatgagaacgacccggtgtttgaatgacaaaaagagctgatcgcgtgtcagctcttttttaataaagcatttcttttttccggtcttcttccgttaaaaattcaataaagctcttcatcgcagacggctcctcggcaatcagccgggtataggcgcttttccgttcctcggacagaatgtcgctttttctgattctgttcagcatataaaggcggatcgttttttgcacctgtttccgctgatagccggcttccttaaaaaacgcaagacccagagccgcaaggagggcaaaaatgccggccgatacgagagctcctctcccggaaggggcctgaatcaaaagcgatgccagatgaaacagactaaaagcggcgagcgggaaagcaagaaaacggtaaatgatgctttttttcatcagcggcgcgatggcgatttgtattttctgaatttctttttttatgaatcccggcaattgttccgcatgctccagcttcatgccctctcccctttgctgtcatttttgtcttctttttcatatatgcatattttaccgcacccggaactttctttgaaagaaaactgcattcatctttgattccggctctttattctttcaaaatgtcaatgttataatttgaaatgggaatcagattgctgcacttgtcggaatactaatgggcacagtcttgataaatatgatatagcggggttgcaaagtgagcatttcatttattttattcggattttttttcgttttaaatatacttttggccgtcatcatgatttttaaagaaagacgcgatgccagcgcttcatgggcttggctcttggttcttttttttattcccattttagggtttattttatacctgttattcggccataacctgagacgcaagcatctgtttcaatgggaagaccgtaaaaaaatcgggattgaaaagctgctgaagtctcagctgaaggatctgaagtcgaggcaattccaatttaacaacagagcgactgtggataataaagacctcatctatatgcttgtcatgaacaaccacgcagtctttacagaggataattcggtggagattttgacggacgggcgcgataagttcaaacgcttaatgaaggacatttccaacgcaaaagatcacattcaccttcaatactatatttataaaggtgatgaactgggaaaaaaattgcgcgatgccttagtgaaaaaagcacgcgaaggcgtaaaagtcagagtgttatatgatgaactcggttcaagatcactcagaaaaaaattcttcaaaccgctgcgggacgccggcggccatgtggaagtcttttttccttccaggcttcgtccgattaatttgcggctcaattatcggaatcaccgcaagctcgtcatcattgacggcgaaaccggctatgtcggcggctttaacgtcggagatgaatatctcggcctgaatccgaaattcggctactggcgcgatacgcacctcaggcttcaaggcacggcggtacacgccattcagacacggtttatcctcgattggaaccaagcctcccatcatcatacgctcacatacgttccgaatcattttccggaatgcgagccgaagggcaacgtcgggatgcagattgtcacgagcggaccggactcagaatgggaacaaattaaaaacggctatatcaagatgatctcaacggccaaacggtcgatcctgattcagacgccttactttattcctgactcaagtcttttagatgccctcaggatcgcctgtctgtcaggcatcgacgtcaaaatcatgattccgaacaagccggatcacgctttcgtttactgggcgactttatcttacatcggcgatcttttgaaagccggagcctcagtctacatttacgataacggctttattcatgcaaaaacgattgtcgtcgatgatgagacggcttcagtcggtacggcgaatatcgacgtcagaagcttcagacttaattttgaagtcaacgcctttatttatgacgtcaccattgcgaaaaaactcatttcctcatttaaagaagatctgctcgtctccagaaaatatacgtatgaagaatatcaggagcgttcgctgtggatccgcattaaagaatcgatttcaagacttctttcgccgattttgtaattcccggggtgtttctcgggaattttctgatataaaaacggacacggcatgaaaaaacacattttatattcaaaagaatgaccgaatagtgtataaatgaaaagtgagtatttttttgtaaaggagtgccatagtttgaaacctgaatcagtgaatcgttcgcttatttctatttcgaaatggggaaaagcgacaggtattttatttattatcgtgggtgcgtttgcggcgctgtcgggcgcgtttttctttttaatcggagccattcccggcgttctgcagatcattgccggcatttttctgatgcgctcggcaaatgaagcgggacagatggcggagcagttcaatgaactgacagaggaacatatgctggagaattatgcaaagttcgtgaaaatgcaggggatctacctgattgttacggtcggcttgtccgttctcggtatcattctcttcattgtcctcatgacgctcggcatcgtggacggcgtgtttaataatattgatgccaatacatattaaaaaggaaaatcccggcgcatccgcccgggattttttcttattccgcttcttcaataacggtaaagcgttcgtttttgtgcttcggatttaccaatacggcgatggcataatggcgcagctgatgcagctgatgcagctgtctgcagatattctttcagacattccggcttcagctcaaaaaagttttttcaaataaaacttttcctcagagtttcaactgaaatcacttaattgttcgactgttcctgatcaggtttgaaaataaggataaaagccctgatggaacaagaccacttatcatacagttttttgggtctttgtaattaaattacaattgttcttaatattcactcatgtattcatgctattatattgaaaggaacgatcaaaagcgttggcgttcgttaaatatttacgagtgctgcctcatgtcaaagtcagaaaaaatagtataggaggtaacatatgtttaagtttaaaaagaaattcttagttggattaacggctgctttcatgagtatcagcatgttttcggcaaccgcctctgcagctggcacagattactggcaaaattggactgatgggggcggaacagtcaacgctgtcaatggatctggcgggaattacagtgttaattggtctaataccggaaatttcgttgttggtaaaggctggactacaggctcgccatttagaacaataaactataatgccggagtctgggcgccgaatggcaatggatatttgactttatatggctggacgagagcacctctcatcgaatattatgtagtggattcatggggtacttacagacctaccggaacgtataaaggtactgtaaacagtgatggaggtacatatgacatatatacaacaacacgttataacgcaccttccattgatggcgataacactacttttacgcagtactggagtgttcgccagtcgaagagaccaaccggaagcaacgctgcaatcactttcagcaatcatgttaacgcctggaagagccatggaatgaatctaggcagtaattgggcttatcaagtcttagcgacagaaggatataaaagcagcggaagttctaatgtaacagtgtggtaacagctcatctttaattaggggcagctaacgggctgctgatcgttccttgagaaattttataatgattgttaagaggcgaacggttttggcattaccggaggcaggatatcattttttgtttaacttgctcacagctgacaccttcacataagtcttaagcaaaataaaaatatcccggtaaccacctcctttagtttcggaggatttcttcattaaacagatcgcaatcccgcatccaggcttgtctgaatatggggtcaaaaccgtgatttcctcattatcccttgtaaccatttttgttacaccgctagcggcatgaaccaatctctttttaacaaaagagatgattcattacatcataaagggacttgctcgcaagttcattctccattgcccgctgtacgcttccgaacgtctcatcgagcgcgcgctgaatatttttgccgaccggacagtcggggttcggattgtcgtgaaccgcaaaaagctcttccctattctgcaccgccctgtaaacctctaagagggtaatctccgacggatcttttttcaggctggctcccggaacacccgcccgggaagtcagaatacccgcttttttcagctggctgatcgttctccgcacgacgacgggattggtgtttacgctgcccgcaatcatgtccgatgacgcccgttcatccgttgagatcagcgatagaatgtgaatggccacagcaagacggctgttaatcatgtttttcaccaccgttgtaaccgcaatagttacatttcatttgtttgtcaactactaatatacactaaaacgggcggcaggatgaaatcaagttggcaatagagggtaaacaggccggcgggaaaccggccgaagagggattaaaataagaaataacgctgtccgagcggaacatagctgacgggctggcatgccagctcttctccgtcggcgaacacctgataggttttcggatcgacttgtatattcggcattgcgtcattcagcttcatgtcgagcttactcagcttacggatattccgtacgggagaaatcattttttcaaggccgagcttttccggcacaccgtttgcgataccggcctgggacataaatgtaatagaggtatttcggtttgctttaccgtatgatgcgtacatctgccgcataaacacgggctcaggcgtcggaatggaagcattcggatctcccatctgggcgcgggcgatcatgccgcctttgagcacaagttcaggtttgacgccgaagaaaaccgggtcccatagtacaaggtcggcgagctttcctttttcaacggaaccgacttcatggctcaggccgtgagtgacggccgggttgattgtgtatttggcgatatagcgtttggcgcgcacattgtcattgccgttttctcctgatagagcgccgcgctgttttttcattttatcggccacctgccatgtcctgataatcacttctcccaccctgcccatcgcctgcgagtcagatgacgtcatgctgatcgcgccgatatcgtgcagaatatcctccgccgcaatggtggccgctctgatgcgtgaatgactgaacgccacgtcttcaggcacttttgaatctaaatgatggcagaccatcatcatatcaagatgctcgtccatcgtgttgacggtatacgggatcgtcggcgtcgtagaggacggcaggatattggcgtaagatgcgagtttcataatatccggtgcgtggcctccgccggctccctctatgtgatatgtatggataacccggtcgccgatcgcatcaagcgtattttctaaaaagcccgcttcattaatcgtgtctgtgtggatcgccacctgaatgtccgcctcatccgctgcttccatgcaagctttaatggcgcttggcgttgatccccaatcttcatgcagcttcaggccgatcgcgcctgcttccacctgctcgatcagcggcgctttatcggatgcattcccttttcctaagaaaccgacgttgatcggaaactcctcggccgcttccagcattctcgacatgtaccatgcaccggatgtacaagtcgtcgctttacttcccgtcgcaggacccgttccgccgccgagaagcgtggtcacgcctgaagaaagcgcgacttccatctgctgcgggcagataaagtggatatgcgtatccaccccgccggccgttacaattttcccttcgccggaaatgacttctgttccggcaccgataatcatgtgcgggtccaccccatccatgatatcaggattgccgctttttccgacgccgacaatccggccgtccttcaccccgatatccgccttgacgattccggtataatccaggataacggcgtttgtaatgaccagatcaagcgctccgtctttcccggtgatacgcccgttctgccccataccgtcccggattgttttccctccgccgaaaatcatttcttcaccgtaattcgtgaaatctttttcgacttcaatccataaatccgtatctccgagtctgactttgtctcccgttgtcggtccgaacagttctgcgtattgctcacgtgacattttcatcggatcgcctcctccatccatccggcttttttaagatttgacagagtcttctcttttccccgctcatccatatacgtatcggccatgccgttgagacctctgaccgtttttcgccctccgatttccacgagcgtgacggttttctcttctcccggttcaaaacggacagatgtgcctgacgggatatcaaggcgcatgccgattgctttgtcccgattgaaggaaagggcgccgttggcttcggcaaaatgaaaatgcgatcctatctgcactgaccgtgttccgttattggtgactgacacctccagcgtcttccggccttcattaatggtgatggttccctttgcgacttgaatcgctcccggcttcatgacttcacctccgctttgatcggctgatgaacggtgacaagcttaaccccgtccgggaacgtcgcttccacctgaatgctgtccagcatttccggaacgccttccataacatctttttccgtcaatacattgcggccggattccatcagctcagcaacgctttttccgtctctcgcgccttccatcagatagcaggtcaaatatgcggcggcttcgggataattcagcagaacgccgcgcgccttccgctgcttagcgagctctcccgccgtaaaaataagcaatttttcttgttcaaccggtgtcagtttcatctgtattcccccttagtgatagtcaaacacaatccgcatggtcataccgaaacgatgcaggcggccgtcacccccttcacctcatgaaatgttaagtgataaaagttattcgacggtgaacgacccgattccttttgcagaaattaccgatttctcatttttttcttcaacaaacgtttaatcaaatgtgaagaaaggttacattctatgtgaatattataaagaaatcgccggagaatttatagaatatttaaaaatttagtgaatattaaccaaatgaactggaatttttgtcatttctcataacaaaaagcccaaaatattttgggcttttgctgtgtttcactatcaaattaatcatcactgagtttatctttcgttttgccgacacccttttgcaggctgcctttcgctttgtcttttttaccttccgcttttaagtcggacttgtttgccatgtcgcctgctttgtcctttgcttcccctttcattttgttcatgccgccttttactttgtcttttaaaccgttatcttgactcatgatctcttcagctccttttttgttctgtgtacttgttttcttccctttcagcctgatagcaaacatttcaactctcaattattgatttcacaccgttccccgtagcggagcactttgtaaacagccaatccgtctgacagcttattatccccgtattgcaccggcagaagggcaaagaaaacataataagttgaaaaatagacaaattggtaaaaaaataagtttggctcgaggacatcttttatgatcagcagatttattaaaaagatagaagcgagattaaacagacagcctccggaatagacgagcgcgctcgtcagacggttatctatccgcaatttgccgaacttgcagaaagaatctatgaagtagatacgccgaacctgaatcggccctacttttaaaagacgtttccccattccgatatccaatgatgccttgcctccgaacagcatggccataaagctgtgtcccgacacatgaatgacagacaccatcggcagaatgatgagaaatgatacgaaaaactttatcatatcattgaatccgaacaacaaatccctccttcccatcgtacttttttctctcttttgcgatttttccgtttttttctatggtcaaacgttatgatgtgcataaaaaaataaccatctgctgatcagatggttaagaaaattatatatcgtataaacattgttctttttgaatgttttctctcatgcgaatcgctttttcataaaaatacgccgcttctttatattgctcatgtgcgcttgtgtaaacggcggcctccaaggcgaaatcttcaatatacacatacagcgatttttcattcatatagtcaaacacttcatggattaaatccatattgagtgactccaaataaagcgcttgtaaaaacttatacttctctaaactgaatcgatcgccccgttctttcgcgatcatgacccctctttcataataggtaagggccgcttggtcatcatgcagcctgaaaagggtgtgcgttaagctgaacagcgccttcggaagctgttcaagctgatgctcttcaaaaacgggaaccgcttttctaaagtaccgggccgcttcatccagatcgcgcttttcagaataacaattccccagattgtaaagcgaagacccgatcaggcggggctgtccttcaagcaaagaaaggcggagggcttcgtctaaatgctcaagcgctttgtcgtagtttttgcagtcgatgtagtttcctgagatgacgaaatggcattgaattctccgcactctgtagaaatcgtgtttcatatacgtatccagcgcctgaatcccgtgattcatggaaaaatgagtctgcttcatgacataaaacacttcagacatcttgaaatggaattccgccctctctatatcatcctcgacaaatgaaaggagtttttccgctttccggtaaaaagaaatagccgcaacatagttattgtgatcgaattcatacatccctctgaacaaatggaaataatactcagacagtcccgatatgctgtccgtgctttcgatcgtcttttgcagctcgctgtactgaatctgtgattgttcggtgcattccggcttgacgtaatcaagcataatatgatggcggtagctgatcagctgataatataacagcagcagctggtcttcctccatacgttgtatatcctcatcaatttcctctttcagctttatggcatcagccgcttgaaacgctaaaatgtgcttgtaccatttgttgatcttgactccaacttgagatgacggaatctcgtatgcggtcatgcccctttcacaaccttttctaatttctattggttatattttaacatattgtatggctttggaattgcataacttgattgtcctgcatcaaaattcctatcatatatttcggctgtcatcggtattttttgaacagaccgctctcatattgtgaataaaaaagcctgcccttgtccgggcaagcttttcttcatccgcctatataagacatttccactttctttttcccatccgttttagaaagcgcgcggtcaattgaatactgatccgtgcgatttctccagacagaagcgatggattccgtcaattcatcatcggtcagaccgccgcgcacgagtttccgaacatcatagccgcttgacgcaaacaggcacgtaaacagctcgcctctcgccgacaggcgcgctctgttgcaggaggcgcagaatgcatccgagacggaggaaatcacgccgatttcgccggaaccgtcaagatagcggaacctggaagcgacctctcctttataattcgcttctatcggctccgtcggcatgtgctggttgatcagatcaataatctctgccttcgtgatcacgtcttttttattccattgattcgtattgcctacatccataaattcaataaaccggagaatatgacccttttctttaaaatagcgggccatcggcaggatatctttttcattgacgcccttttgaacaaccatgttgattttcacaccgagtccggccgcttttgccgcctcaatgccctcaagcaccttgttcaccgaaaccccgcggccgttaatggccttaaaccgctcatcctctaaagaatcgaggctgactgtcacgcgatgcagccccgcctgcttcagtttttccgcatacacgggaagcagagagccgtttgtcgtcatcgcgatatctttaagtccggggatgcgcgcaagttttttgatcaattcaggcatatcttttctcatgagcggctctccgcccgtcagcctgattttttcaacgccgaagcggccgacaaacagcttcgcaagccgctcaagctcctcgaaggagagcaattccgtcttttgtaaaaatggataatccggtccgaataattcggctggcatacagtacgtgcatctgaagttgcagcggtcggttacagagatacgaagatccctgagcggcctttcccttttgtctgtcacccggcgcgtttctgtattcataagcccaagacccctttctattgttcaacccgttcaggatgtgtgtatacgttaaatgatccgtttctgacaaaacctatcgcggttatgttcagctcttccgccatttgcagcgcgagctccgtcggcgccgattttgaaatgacaatcgacacgccgatttttgcggcttttaataaaacctccgaggaaatccggccgctgaagacgatcagcttgtcacggaccggcattccgtttttcaaacagcagccgtacagcttatccagcgcgttgtggcgcccgatatccgtcctcataaagagcagcttttccgtatcgcacagcgccgcattatggacgccgcccgtttcctgaaaggtgccgcttccgctttgcatctccttcatcaggcgaaggcacgtctcaggagttatggtgatacggctgacggcggttttggccgttttcacatcctgctgaaagtaaaaatggcggcctttcccgcagcatgaaccgatgaccctcttcgtatagtctttttgctcaagcactccgggattcgtcagttcaacatatgcaaacccgagactttcatctatagtaaagcttttgatttctttttcaaaacgaatgacgccttctgatgcgagaaatccgatgacgagttcctctaaatgttcaggcgtgcagacgagcgtaacaaattcctgcccgttcaccatgacggtcagcggatactctgaaaccatccgatctgccgtctttgttaatacccctttttcatagcggtatatgtctcttaccgctgttgttttttcatccactgttttcccctccgcagtatccttctcttttattcttccacaatccctgtattttgtcgaatttgcggtttaaaaaaagagccctcttaggactctatgtttcattgcgatgatgtctgctcagaatggtgaataaaataactgcggcgataatggccaatatactgacgaatatgaaggcggcaagcttcagaaaaattcccatcagaacaaaaacgactgccgccagcactaatataatgcctgctccttttaacaacagcgttcatctccttttatccgtatcattcccgcggttccgttttctaaacaaaaaagacgccgcgcgggcgtccttttttaacctattcttttgctaaatcctttgcagcgtcttcccaagcctgtttgaactcgtccgcgctgtcagctgagacatatgtgccgcctcccgcttccgccgctttttcaaggctttcgcttcctttcatgccgaagttgaagccgatgatattgacgatcgtgttgacgttcgctttacggagcttttgaatttcggcctgaggattaccgccgcatgtttcttcaccgtctgtgatcagatatacgacgtttttccccgtggcgccggcccgctcaaattcttctcgcgtatcagagagcgctttcgcaatcggtgtccagccggtcggtttaatcttgctgagtgattgctcaaatggagtcacggcgtacggctgaaggccgtataacgtttctgtcgcattacatgatacggctttgcctgagtttttattattgcccttatgcccgaatacccgaagcatcagattcgtgtcttcaggaagaacttccgcaaaagaagtgacagactctttcgcaacatctattttacgctctccccctgttttttgtatcatgcttccgcttgcatcaaacagcacagcaacgtttgtttcttcgtgctttttctcagctgcaaaaacaggtgatccgagtgaaagcgtcaaaagtccgacaatccccgcagtgaacatttttttcatttccttcattcctctccgtttgtttttggccgatgggccctcggctcttctctatgctagatgacgtgtatgcaaaaagatatagggcgggattccttttgtataagcggctgtacaccgttaaaaatgaacagaattatgcgcatcatcctaaaaagattggataaatgatgacagatttaatgcctttttcgccctttttgtaatataagtccggaatctgattctttttacagttttctcttcatcttttcttgaaatttttgttaaataaaaataaaaaaaagggccgataaacggcaccttttcttattccgctaatgaactcgctgccattgtaaagatgcggttcatatccttttggctgtgagcttcgtaatattttcctccgcccgctttggcaatctcgtgaagctggccgttgaagccttccttaaagtcaaagccgatcacgttgactttaatatgctgtttacgaagttctttcgctgtcttaacaggatctcctccgcatgtctcctcgccgtccgtcaacaggaaaacggatttactgcctagtttgtgcaaaccggtaaaggaagccttcgcatcctctaatgcttttgcaatcggtgtccagcccgtaggcccgattccgttaagagagttaaggaagctctgtctgtcaaacctttggaatccgtacacaccgcgaatggattcacaagattgaacctttccggagtttttattattgccttccgaaccgaaaactgtcattctgacctgtgatttagatttaatttgatccgcaaaacggacaatttcttcttttgccatgttgtatttagaaacaccgtcaatccgttttgccatactgccgctcgcatcaagtaaaatggcggtattgtttttaaatgaaagagtcttctcgtttgcattctcggcagcaaaagcaggagatgcggcagtcagcatcaatccgagcatgagtatgagtgaaaatgtttttttcattgctttttccccttttcaatagatttacgttcaacgccgaacaatatttatcgtaaatgagatgaaaagggaaataaataggacggcgttcctcattatttttgcgtatattcacatagaagcggcatttttatcagtgatttacacccggcgctcagccttcaatcgacatttgtcagcctttaggctttcgttatatgagtctgttggttgctttaccgtttatggaatagttttcaaaaaaaacagacgctcatgaaagcgtctattttttcgccatatatttgtttaaaaatgaatctgcttcggaaatgtctactccctgataataatgcttgacgatgtccgccactgatttcccctgctccgccatgtaattggccccgtactggctcatgccgacgccgtggccgaatccttttgtcgtaatggtgatgctgccgccgtttcgtttccattcaaagtcggcagaacggagtccgagtttttcccggatgtctcttcctttcagctttttgccgttgatgacggccgttgccacttgatggcccggcgttctggctgtaatctgtcccaccgtgttttgtcccgagagctgtacgccgagcttttgctgaaactccggcacactgaaggtctgggtggcaagatatttcggcgattgcttatcccacggacttttcacgctttttaaataaggaatggcgcttgtccaataggcttccgcattttccgtatacccgttgctcgtagagaagaaagatgcctcaatcggcttgttatcgtacgttaaaatctttccttgcgtgccggccaccgcgtttgtgattttcttgaggttgtgtgcgtacttagaaccccattcttttttcagctggcttttgctttgatagacttggaacatttgcgtatcatccaccagtgatcctttcggcgcctggacggctgagtcagcgaccatcagtctgacgatgaatgtccgggcggcgagcgcctgggcttttaaggcctccggtttaaagtttgcgggcatttcggaagccacgacaccgatcacgtactcttcaagcggaatgttttctacagaatgattggatgtccgataaaccggaatggatacaggtgattctttcaatgtttctgctccttttgtttctcgtgtggtgtgtgctgttttgtgtccgggctctctgtttacagctgctcctttttctgcctgaaacggaaggacgagaatggtggggactagaagaataagtatacacagcccggatagtagaaatacaatcggtttcatatatcagctgcctcctgcttgggattcgactctacttcatcttatgggcagggacaagctaatatgacttccttttggacagaatctttattccatttttcacgcgaaaaacgtattcttttttggaaatcagagcataataatgatgataaaccataaaaaaacagtatgccagattgacatactgtttttacagccattatgcgtttagatcagttacgacttctttgctttcttgttcagcggccgtttcatcaacgacacgctcgatgtcagcgccaagagccgcaagtttttgatggaaattcacataaccgcgatccaagtgcttcagttccgtgacgcgtgtatgaccttcagccactaatcccgcaagaatcagcgccgcgcccgcacgcaggtccgtagcggcaacttctgcgccttgcagctgtacaggaccgttaatgatcacagaacgtccttcaattttaatgtcgccattcatccggcggaattcttcagcatgcataaaacggttttcaaacacagtttcagtaatcatgcttgttccgctcgcacggagaagcagcgccatcatttgcgactgcatatcagtcgggaatcctgggtgaggcatcgttttaatgtcgatcggcttcagctgggcaggaccgatgacacgaaggccttctccttcatccgtaattttgactcccatttcttccatcttcgcaattaaagacgtaagatgctcaggaaccgcacctttgactaatacatttccttccgtgatcgccgcagccaccatgaaagtacccgcttcaatacggtcaggaatgatgttgtgtcttacgccgtgaagcttctcgacaccttcaattttaatggtgcctgtgccggctccgcggatttttccgcccatcgcattgatatagttcgctaagtcaacgatttcaggctcttttgccacgttttcaagcgttgttgttccttcagctaaagcagctgccataatcaagttttctgtcgcacccacacttgggaaatctaaatagatttttgcgccctgcagacggccttccacttctgcttcaataaagccgttgcctactttgatttttgcacccattgcttcaaagccttttaaatgctgatcaatcggtcttgagccgattgcgcagccgcccggaagcgctactcttgaatgacccgtacgggctaacagagggcccataacaagcactgacgcgcgcattttgcgcacatattcaaaaggtgcttctgtttctaaagcgtaagaagcgtttacggtaacttcattattctcaaaatgcacatctgctcctaaatgacgcaacacttcattaattgtatatacatcggagagcgtaggtacatcacatattacgcttttttcttcacttgctaataaagatgcagcgataactggtaaaacggcattttttgctccttcaactttcactgtgccgtttaacttctgaccgccgcggacgatgattttttccaaggtattcccctccgcgtccctatattctctatattaatattcagtcgtcacgattggtgtgccaaccgtaacggtatgtttttcgcccattcccgcacttctaagcgcaacttgcacattcatcttatgtttcgatgtcatgatgtaatctgtccacttatatgtaaatgcagaaacagaaacgaaatgaggctcaactacatgttcaactggacttgcttcaaattctttcatgagctgttctgcttttttttgcaaaacaatactcatattatcatttaaatgacccttaagacaagtaaaaataaatactttattttgaaatatgtcatgtgcctgccgttcaaactgttcatatgtatcattccagttttccggttgctccgggctcatttgctcatataataaatacgaagttgggttctggtttttgagggtagtgacgagctgcagtttaaaagttgtgtgattttttttgtcagaatacgtgccgacggcctttacgattttatcttcccgcgcggattcccaatgatattgcggatactgcgtcttcagttcttttaccttgtcatcaaattcactcagtgacaggttcagattttttttcgcatgaagcgtccattcatctacagtgacctgttgccgctccattccttcggcaatctgggcaagcggagacagctcacttgcatgaatggaatgaaataccgctattaaggcgcttaaaaaaacaaaaaataagatgatgcggcctgctctttttttcttcatatcgatctctcccccttactcccatttttgccggagccggggaaagcaatacatggaaaacttcgtcaaaactcgccaagcgggtgaagaaaattggtttctcacccagcgattcccttcatttcaacagacgaaacatcttaaaataagtatggaagctgtttcgaataggtaagataatctaaaaagaagtcagcgactgccgtaccgatcgcaatggtaagaagaatgatcagcagcctcgcctgcactatttttccttttcggatcagcggatcaaagttgacggcctgaagcgcccaccatgtcaccgcaatgcataccaggtgaaccaggatgctgattgcggcctgctgccccaatacattcacaaattccatctcctttcattttttccgcccctcatatcctctcttattatataagaagaagagagaaagatgatcatttttacatcagaatttttatccaaaattaggggcaatccccgcttaaatgtccgttctccggcatgatatacttttttggaaaggagatgggaatatgaatcattccttttttcatccggaaaagcagtatggagaaacacttcccgtatttgaccacgagtgggaagcgatagcattctactatgattatagacagtctcaaacagaggaactgaaagaattatgtcagtttttcaacatttctcttgattattcacgcggcagcctgctggaagtggaagctctttacttccgcagcatacaagagctgcttttggcggattggaacctgccgattgacgaatttgagaaaatgctcagtgtgtatgtcatcgattgcgccatcagacaccatgacgatgccgcatgggtcgtcaaaccttatccgtatacggacggcgcctatacgacgggtgtgcggagaggaaacaaaacgtggcacaccgacaactgctgcgaacatttatatctgcaaaaagaagaggatcatccgcttatcggcgtctatgaatctcttatgcgttaatatagaaaaagaatccttctcagacagccgagaaggattcttttttagtttcctgcaacatccaatctgtttacagcccgctgtagcgcaagctcagcccgacgaatgtcagtatcatctgatcgtttgttcaaacggtcttccgcccgctttttcgcagcaagggcgcgctctttatcaatgctttccgctgtttcagcggcttgtgcaaggatagtgacctgatcaggacggacttctaaaaatccgccgctgacagccgccaattcggtctgtccgtcttttttaaggcggacagcgccgattttaagcggagccacggtcggaatatggccaggcaagataccgagatcaccgctctcggctcttacacttaccatttcaatatcagcatcatatactgggccgtcgggagtaacgatattgactttaacggtcttcatgcttttaccctcctaggaccagattaaacttctacacccatctcttttgcattctcaatgacttcttcaatgcgtcccacaagacggaatgcatcttccggaagatggtcatatttaccggaaaggatttctttaaagcctcgtaccgtttctttaacaggcacgtaagaacccttttgtcccgtaaactgctcagctacgtggaagttttgagaaaggaagaactggatacggcgtgcgcggtgaacgacaagcttgtcttcttcacctaattcgtccataccgagaatcgcgataatatcctgaagttctttgtaacgctgaagcgttgactggacttcacgcgccaccgcataatgctcttctccgacaatttccggagcaagcgcgcgggaagtggaagccagcggatcaaccgcagggtagatacccatttcagttaatttacgctcaaggttagtcgtcgcatccaagtgagcgaacgttgtcgccggagccgggtcagtatagtcatcggcaggcacgtagatcgcctggatagatgtaactgaaccaacgtttgtagacgtaatacgctcttgaagctgacccatttctgtcgcaagcgtcggctgataaccaaccgcagaaggcatacggccgagaagcgcggaaacctctgaacccgcttgtgtgaaacggaaaatgttatcgataaagaacagtacgtcctgtccttgtttatcacggaaatgctcagccattgtaagacccgtcaatgctacacgcatacgtgcgcccggcggctcgttcatttgtccgaagaccatggctgttttcttgataacgcctgaatcgctcatttcgtagaaaaggtcgttcccttcacgagtacgctctcctacaccggcgaatacggaaataccgccgtgctcttgcgcgatgttgttgattaattcctggattaatacggttttacctacgccggcgccgccgaacaatccgattttaccgcccttgatgtaaggagcgagcaggtcaacaaccttaattcccgtttcaagaatttcaacctcagttgaaagctcatcgaatgaaggagctgatctgtggatcgggtccttttgagcatccgcaggcagcggttcatttagatcaattttatctcccagtacgttaaatacgcgtccgagagtcacatcaccgacaggaacggaaatcggcgcacctgtatcaacagcttccattccgcgctgaattccgtccgttgatgccatggcaattgtacggactgtatcatcgcctaaatgaagagcaacctctagcgttaggtcgatgcctacttcattttcgcctgtagctggctgtgaaactttaatcgcattataaatcgcaggcaagtggccgtcctcgaaacgtacgtcgacaaccggtccaagcacctgacttacgcgtcctttcttcatcgctatccctcctgacaaaatctttctattctaaagcggctgcaccgccgacaatttcggtaatttcttgtgtaatcgccgcttgacgcgcgcggttatatgaaagcgaaagtgaatcaatgagttctttcgcattatcagtcgcatttttcattgctgtcattctcgcagcgtgttcacttgctttactgtcaagaagcgcgccgtaaattaagctttccgcatattgaggaagcagcacttcgagcacctcttcttcatccggttcgaactcgtaagaagccgtgcgcttcccgctgctcgttccgaaatccgttaaaggcagcacttttttctccgtcacttcctgtgaaatcgcactgacgaaatggttatacaccaaatgcagttcatcaaaagcgccgtcgataaacatttgaaccgtctgacgggtcaaatctttaatctgagcaaaagtgacctcgtcgccaagccccactaactcagacaaaatcggcatttcccgttttttgaagaaatcgcggccgactctgccgattgcaatcaccgtgtattcatctttagactgatggcgttcttgaatggtgcggtaagcgtttcgcaaaaccgaactgttaaacgcacccgcaagcccgcggtcagacgtaatgacgagatacgccgtctttttcacttctcttgagacaagcatcgggtgtttcgcgtttttcgcgccttttccgacgttaaacacaacctcctggatcttatccatatacggagcaaatgacttcgcgttggtttccgcacggttcagcttcgcagcggataccatctgcatggcttttgtaatctggcttgtttttttcgttgacgtgatccttgacttaatatcgcgtaatgaggccaaagatttcaccacctttattcttcatttgcgtaaaaagagagaaaaagagaacctttttctctcatcttctaagggttagttgcttggtgcaaatgtgcgtttgaagccttcgattgcagctttgaagtcttcatcagcaggaaggtttcctgttttcgcaatgccgtcaagcagatctttatggttttgatcaaggtacatgtagtactcttcttcaaaacgtctgatatccgcaaccggaatatcatcaagatatccttttgtcagcgcataaagaatggctacctgtttttcaaccgggagcggtttattcaagtcttgtttcagcacttcaactgtacgcgcaccgcggttcagtttcgcctgagtcgcctggtcaagatcagatccgaattgggcgaacgcttcaagttcacggtatgaagccaggtcaagacgcaaagttcccgctacctttttcatcgctttgatttgggctgatccgccgacacgggatacggataatccggcattgatcgcaggacgcacgcctgagaagaataggtcggattgaaggaaaatctgtccgtcagtaatggaaatgacgtttgtcgggatataagcggagatatctcctgcttgtgtttcgacgaacggcagcgccgtaattgatcctgcgccttttgcgtcactcagcttagctgcgcgctcaagcagacgggagtgaagatagaatacatccccagggaatgcttcacggcccggcggacggcgaagaagcaatgacagctcacggtaagcggccgcttgtttggataaatcatcatatacgacgagaacgtgcttgccgttgtacatgaattcttcacccattgtcacccctgcatacggtgcaaggtacagaagcggagccggctgtgaagcggacgctgtcacgacaatcgtgtaatcaagcgcgccatgcttacgaagtgtttccaccacgccgcgcactgtagattctttttgaccgatcgctacgtacacacagatcatgtcttgatctttttggtttaagattgtatcaatcgcaacagatgttttacctgtctgacggtcaccgataatcagctcacgctgtccgcggccgatcggaattaacgcgtcgatcgctttgatacccgtttgcagcggctcatgtaccgatttacggtccattacgcctggagcctggctttcgatcggacgtgttttgcttgtcagaatcggacccagtccgtctaccggctgtccgagcgggttgacgatacgtccgattaattctacacctacaggaacttccatgatgcggcccgttcttttgacctcatcaccttcacggatatctctgtaaggtcctaagataacgatacctacgttggattcttcaaggttttgagccatacccaaaacgccgtttgaaaactcaacaagttcaccggccatacaattgtcaaggccgtgcacacgcgcaataccgtctccgacttggatgactgtacctacgtcatgaacttcaatttcagattggtaattttgaatttgctgctttatcagcgtgctaatctcttcagctttgatgctcacttaggtttcaccccttctatcgatttcctccggcaagttgacgttccatgcgctcaagctttccgcttacgcttccgtcatatatccggtttccaatgcggactttaatgccgcctattaaatccgtctgcacttcatttctgattctgagcgaagcgattccggctttttttgcaaacacttgagacaatgataacatttccgcttctgacagcggttttactgaataaacaaccgcgtcctctgtctgacgggcctgattggcaagtttgataaactcgtctgtgagatcaggcacaatcgaagaccggcggcggtcaatcagaagaaaaatcgtatgcagcacagactcagacagtgcgccgaacgattgctgaatcagctcttttttcttagcggccgataccttcggatggcttaacacttcctgtaatccggcttcgttccggaacacttcttttagtacggtaagctcttcttcgatttcattgatttgagaagtctcaacggcaatgtcgaaaagcgctgacgcgtatcgtttagagacagcagatccactcatcggctttctcctacctctttaagatagtcctgaatcagttgttcctgggcttgttcatcaagctctttttcaatcactttcgatgcgattaagacagaaagtgatgcgacttgctcgcgaagtgcggaaaccgcttgttctttttctttaacaatttcggttctcgccgcttctttcaatctttcagactcggcgcgtgcagcctggataatgtcttccttctgcttttcacccagttttttcgcattttcaatgagtgattgtgattcctgtttcgcttcttttaaaagaacgcgctgctcttcaatcagcttctgcgcttctttatttctttcttcagcggacgtaatttcgccggcgatatgatcttcacgctgtttcattatatttaatagcggtccaagagcgaatttcttgagaagcgctaataaaactaacatagctaacaattggaataggatatctccgccgttaaacgacagtcctaattcaagaggtaattgagacatctactacggcaactcccttctgcaggttttctctgctgataaaaagccgtttcgggacggcctgcttatcagacataaagcaatggcgaaggttctcttagagtgatcttcgccatttttagttcatataaggcttttttgcttagccaaagaacgctaagaacgcgataacgacagcgataatcggaagggcctcaaccaatgcgatacccatgaacataagagttctaagttcttttcctgcttccggctgacgggcgattccctctaccgtacgtgaaacgatcagaccgttaccaatacctgcaccaagtgcacctaaaccgattgcaattgcagctgctattaaattcatgaaaaagttcctcctttaaaatgttatccgaatggatatatgattttaatgatcatgactgattttgtgtgacatgtacaccatcgtcagcatcgtaaagataaatgcctggatggtaccgatgaacaagctgaacgcctgccatgcaagcatcggaagaatggctccgactgtgccgaccaaaccgagaaagaagctgtttgagtagaaattcgtcgccagattcgcaagcaggccaagaagaatttccccggcgaaaatgttaccgtaaagacgaagtccgagtgtcagcgtattcgcaaactcctcaatgatcttcatcgggaacataagcggaaccggtctgaggtaatccttagagtattccttcaaacctttcatcttcacgccgtaatagtgcgttaacgacacaaccataacggctagagtcagagtaatagccggatcggccgtcggtgatttccaccaaagctcgtgtccgaccgttacagaaaacggcagccccagcatatttgatacaaatatgtacatcagcaaggttacaccaagcgccaagaagttagcccctgtttttaaatccattgtactgcctataatattgcggacaaaatcaacaatccattccatgaagttctgggcttttcctggacggatggacagcgttctcgtagtgagaatcgcaatcagcagcacaatcacacttgccacagtaatcatcagaatgtttgtcagattaaaagtaagaccaaacaaatccatagttctgtaatcgtgattcaatgggttttcacctctcttccattgatgaacgtttgagctgaataatggaatctatcataatgacgggataaattgtcattaatccaataatcacacttgccacactgactttatcgggatatttaaaggcgacagccatcgcaagtatcgcattgcaccaacgcgctgcgctcccgagtgatcgtatggactttcctttcgccacggccttgtcaaaagcattcattcttctggtcaagagccacaaattaaacaaactgaaaacagttcccaaaaagaggcctagaaaaacagttttatacgccgtaagaccatatcccagcaaatagattgctaagatcacaaatacatatctccgttgtctgctgaatgtaagattgggatcgtccatcaactatctgtctcctgatgaaaatgtaatataattcctggatacggcaaaacatgcggttaacccttgcagaaggccttttttgtccgcaaaacggcctgttcgaaaaaaccactcatcctcctgatgccacgggatgctgtttcattcgcttagataaatcctcatataacgggtttttttggaggatttaaaatgaggatggatactagaaatgaaaggaatgaaaaccttctcataataccctcgtttagcatacaatagcccctaacatgtgtcaatctgtttaaagttaaaaaactttttataccgaaagcatacacagaatgttcacaatttcacctataaatgtatgaactctgcccattcagcaaatatctggataaaaaaagaaaacccctgaatgaggttttccgatttatttggttccgtacagtctgtcacccgcgtcaccgaggcccggaacgatatagcctttttcattcagtttttcatcaagggcggcgatgtaaatatcaacgtcagaatggtgtttctgcagctcttccacgccttccggagccgctacaagacacataaaacgaatgtttctcgcgccgcgctttttcaggctgtttatcgcttccaccgcagagcctcccgtagcaagcatcggatccacgacaataaattcgcgttcttctacatcagaaggaagcttgacatagtattccaccggttttaaggtttccggatcacggtataatccgacatgtcccactttagcggccgggattaatttcagcatgccgtcaaccattccgagacccgctctcaggatcggcacgataccgagtttcttccctgaaatcactttggatgtcgctgtttgaacaggtgttttcacttccacttctttaagaggaagatcacgtgtaatttcaaacgccatcagtgatgcgacttcgtccacaaggtctctgaaatcctttgtgcctgtattttcattccgaatatatgtcagcttatgctggattaaaggatgatcaaatacgtaaacctttcccatactgtgttcagctccttttttgttgtccgagtgactttttcacacttctattgattctacagaaaaagacaaacagtttcaagaaaatcataaaaaaacccgccggattaaggttccggcgggtttcttccttattaatagtccagttctttatataaaggaaacttttcagtcaaggcagatacgcgctgtctcgcttcttcaagttttgcttcgtcttcatgatgtttcagcgcgaggccgatgatggcgccgacttcttcaagcgcgtcaccgtcaaagccgcggcttgtcacagctgccgtaccgaggcggattccgcttgtgacgaacggtttttccggatcgtaagggatcgcgtttttattagatgtaatgccgatttcatcaagaacgtgttcagcgacttttccggtcagaccgagagaacggaggtcgacaagcacaaggtggttatccgttccgcctgatacgagctgaatgccctctttgttcagagactcagccaggcgcttcgcgttcgagatgacgttttgcgcatatgttttgaaatcatcttcaagcacttctccgaaagaaacggctttggccgcgatgacatgcataagcggtccgccttggattcccgggaaaatggatttatcaatctttttgccaaactcttcacggcaaaggatcattcctccgcggggtccgcgaagtgttttgtgagtcgttgtcgttacaaagtcagcgtaaggaaccggattcggatgaagaccggctgcgacaagacccgcgatatgcgccatgtctaccatgaagtaagcgccgacttcatcagcgatttcgcggaattttataaagtcgatcgtgcgggggtacgcgctcgctccggcaacgatgagtttcggcttatgcgccagcgctttttcacgcacatcttcataatctatatattgcgtgtctttatcgacaccgtattctacaaagttgtattgaacgccgctgaaattaaccgggcttccgtgtgttaagtggccgccgtgggagaggttcatcccgagcaccgtgtcgccgtgctctaaaatcgtgaagtaaacagccatgttcgcttgagcgcctgagtgcggctgaacgtttacatgctcagctccgaaaatctctttcgcgcggtcgcgggcgatgtcctcaacgacatcaacatgctcacagccgccgtagtagcgtttgccggggtagccttcagcatatttgtttgttaaaacagagccttgtgcttccattaccgcttccgtcacgaagttttcagaagcaattaattcgatcttagtctgttgacgcttacgctcatctttgatggcgttaaacacttgtttgtcttgtacaggtaaatgtttcatcagcgagatcctctcctatccgtttcctgttctttatttttaccacccttattgtacatggtttttcaggtgaatgtaacagcttatttaaaaaaatcacaaaatttaattagaaaacacgaacattatacaggaaaagcattttcatcattcgcattcataaacggcgcgaattccgcctatcagcttcggccttgtccgggccatcgtcacatgtgcttctccaagctcacggcttgatatccggacagggacggcaacgggtttcagatgcatgccgatgaacgtatcgccgatgtcgatcccggcgtcagcctgaatcgattcggcgagcacgggagaacgcatctgccggtatgcataagaggccattgctccgcccgctttcgggacggggacggctgaaacaatggggagcctgaaccgctcggccgtttctgcttcaatgacaagcgccctgtttaaatgctcgcagcattgaaaagcaagatgcacacccgttttttccttaaaccggttaagtccgccgtatatcaattcagcccaatccccgcttccggcggtgccgatccggcttccggcggcttcacttgtactgcacccgatcaccagcagactgccgtccgtcagtcctgcctgctcttgaaactcagtcagcatgtccgtccatttttgcttcatctcttccattgtccagcacctcttacagatttttttcttcgtaatctgcgattttgccgatccgccgttcgtggcggccgcccgtaaattcagtcgtcagccagacttttgcgatttcgcgcgccagccccgggccgatgacgcgttcgcccatcgcaagaacattcgtgtcattgtgttcacgcgtcgcttttgcgctgaaggtgtcatgggcaagcgcacagcgtattccctttaccttatttgcggagatgctcatgccgatgcctgtgccgcaaattaaaattcccctgtcagcttcgccgttcaccactttttccgctaccggaaaagcgtagtctgaataatcgacagagccggcgccgcattcacagcccatatcaatgtattcaatctgcaattcatccaaaagactttttatttcttcgcggatatggacgccgccgtgatctgacgcaatagctactttcattcatttacctcctaggtgtggctgggcgaagacagcccagtgtgcttgtcctttttattacgaaatccgttgatttcattctactctttcacattcgttttgcaaatgacctgtttgcagattttctgacagattacttgctttttccgtcaagcaattgatcagccaaaagggtcagcagctcctccagttcgtcccgcgtttgtttataaacatcaagcggaccgccgaacgggtcagagatatcgccgttttctcccgttacgtattctttaatggtaaagactttgccctgactgttttgatatcggccttcaatcagctgtttgtgctgttccgtcatcgccagcaccagatcagccgtctcgatatgttcttccgataagggagatgaactgtgattgagagcgatccgtttttcaaacagcgcttctacggcatgggctgacgcttttccgttcggagacgcgaatacgccggccgaacttacgctgacgtccagccctttcgtttctgcaatggatttaaaaagagcctcagccatgggactgcggcacgtattgcctgtacaaacaaagattattttcatgtccgtcacctcttactgcctattataaatgaagaaaaaagaaacggcatcttcgtttctttttttacgtatcttataccggtaaaagcagtttcagcccgaatccgatcaaaatggctccgccaagcgcttcgctgtacgagccgagccacgactgcacctttcttcccgccaaaaggcccgcccatgttaaaacggtgctgaaaaccccgaacagcgtaacggccagaaacggattggaaccgttcatcccgagactgagcccgacagaaaagctgtccagactgacaccgaccgcaaacagcaacagtcccgagcctgccggagatatgagcggcccgtctgattgtttaaacgcggcgatgatcatctgcacccctaaaatgaaaagaagagatccgccgatgtaaacggcgagcatccccagaaaaccggacagcagatgcccggccgccattcccgcaagcggcatcatgacatgaaacagcccgatgacaacccctatatgaaaaatctgttttttcttcagctgaatcattcccattccgagcccgacggaaaaggcatccgtccccaaagcaaatgccatgatgcttaaggagacaagttccccgatgaatagattcgacatgaaataaaaacccccttggacgtgcccgcttgtttagcttatgcatgtccgataaggggtagaacaagttaatggataacggtgccgcctgcggctttcatcagcctgttcataatggcaagccccactccggtatccggaaaggactcagaaataatcatgtccacttccgcttcatcaaagctgcggagcgcatcgtataaggcggacgccactgtttcaaggtcggcgcgtctgccgcagaccttgatataatcagcctggtaactatcggcgttctcttctgttgtcagaatgccgattcgtttcccccggcttttatatgcgtctgccagttcttgaattctccgggcgccgccgtcggcaatagccatcggcgcagaaggcgcgtaatgtgtatatttcataccgggagaaataggaacctcatcttcttcggtcagccctttatccacaagaaccggaccggcggcggattcaatctgctcttttgtcacgccgcccggacgaagcagcacgggctgtttccccgtacaggacagaacggttgattccactccgattcccgtcgcgccgccgtccacaataccggcaatgcggccgtttaaatcatgggctacatgctcggccttcgtcgggctcggttttcctgataaattggcgctcggcgcggcgatcggcagtccggccgagctgatgagggctaatgctaccggatgatcaggcattctgaccgctaccgtctcaagtcccgcggtgacacggggtgacagcacaccgggcttacacggcagaacaagggtcagcgcccccggccagaatagcttcataagctttttcgccgtctcaggaatatggctgataaaacgatcaagctggctgatatgggatatatgcacaatcagcgggttatcgctcggccttccttttgcctcatatattttcgttacggcttccgtattttcagcgttagcgcccagtccgtaaacggtttctgtcggaaaagccacaacctcattctgccgcagcaattccgcggcttgtgtaatctggggatcggttgtggataattctgcggaacaatccacaaaccatcttcttgttttcatgtataaccaaactccttattttaaagcggtaaaactttattttctctcgtgtattccttttgaaagtataaaagatgtcctttaataaaacaagtgttatccacaaactgtggacaacactttttaataagtggataaccttgtgtataagttagatcaggcagaggttttcaccattaaaaacgaaccttctgtgcataacgagttgcggaaatgttcggacgtatacagttcatcaggcgcatcggcgcacgcttcaaatcccatcacattcagaaactcagcagatgagggctgattggcgactaagtagacatcttgaatctcatgttttttgcacagcacatccatactttgaaacagtgtaacgatatggctttgattcagcctgtccgacatgacgagtgaacggagaagcccttttccgccgctgaatttttcgatcccgagacaggcggcaatcattttttcgctgtcttccagtacgataaaccggctgatctgctgatcgatttccgcatgtgccgtatcagcctttttcaaaaaggcctccagtgcctccgtatcttgatctcttgccactctcagctgataaaacatatatttccctccgtttcgatcaactctttcttccaatctatgaatcgaatccggatttatgccttttacttcaggaaaatagatctgaaatccaatcgacgaggaaaaacttcacttcggtatcatcgtcatctttattttctttcttcgctttatcagcctttgcttttacgtcatccagcacttttttagtctgtttctgcgtttcttcctgcttctgtccgccctcttcctgatctttcaccgcttcgccgtttgagaaatcaaggaagcacagcggcggaaacaagacgcaccaccagttggcgccctcgccattgccgagtgtaattaaaatcgcttcatattttccggccggatagaccatattgccgtagagctttgtcggaaacgagattttattgaattgaactgaaacggattgatgcgcacccttttctttcatcgtttgtttggcgatttctttaatttcaggaagcttcgaacgaatgagccgccgcgcttcttcaatggaagtgatatctttcacccagtccgtgatttgcttgtttacagcatctctgatctggcgcttgagcttttgatcctcatcgttatcactgttggccaaaattctgagtcggatcgcttcatccggtatgacgacgggctcatcggctgatgcccgcgccgtttcttcttttgtcaaacccgcaagcgctcctgataataaaagaaaaatatatatgcagatcatcattgtctgtttcatcggtccccaccgttcctctccgtgctttttttatctagtcccattatggacatgacggaaaaggtttaaaccggcgggaagaaaaaaatctagcaagctgataatctgcattgacagattcaaaatatggtacgatattattttgataggaggttttcagatgaaatataattacaccgtgctgctgtcggcggcatgtatgtctgtcatttattctattttgtatgttcatcaattcattatcgcggctttcatttcgatggcgttttattttttgtttccttatttgatttttgcactgccgcttcaatactttctgaataaaaagccgaagagatttcatccgctgtatcttctttattatttaggggtgtcattcattgcaaacgggatcatcttcggtcttttgcagccgtcaggccaatctctgttttctaattcagccttttatatctttgcggttttaacagccgtcgtctattgggtatgggattccgtattgctgcaaagacaaaatccggctacagaagcgtaatcagcagacagccggctgaagggagagcggcgcaaaagaaaacggcggccatctttaaacgggcgtgccgtccttcttctgtttcagaatgataattggcccgctgctccgctccgcttacggccaacccggaaacgatgatcgctgtgacgataagaacagccgtaacggcgtcgaaaatgatgtcaacgccaaacggcagaacaacccccgccgcataagctgcggcggcgagtatacatccgaaggcgaacgcttttttcaaggcggatgcccctttcattttctttccattgtaacaaaagcccgccgtgtgcgtcaccggcgggcttttttcatgatgtgatgaccgcggatacggttctgtcttttccgttgatgtcctgtacgacttccacttccgcattcggaaaggaatgacggaacaggtctttcacggctttcccctgattatatccgatttcaaagacgacaagcgctttatctttcatgacaagaggcagctcctccataaaccgcttgtagaatttcaaaccgtcaccgccgtccgtaagagcatgaagcggctcatggaaacggacgatatccgacaaatcggccatttcttcttcagaaatatacggcggattggaaacaataatatccgcttttttccctgatgaaataaaaggagttaacagatctccctgcaaaaaacagacgtccgctccgaggttttgcgcatttctttccgccacctgcagcgcttcttttgaaatatccgaagccgatactgaaaaatgtccgcattcaagggcgagcgtcaccgcaatggcaccgctccccgtaccgatatcaatgacgttcagtcgttctgcctcggaaaatgcccgcttctgtctgtccagcagatgaaagacgacttcttccgtttccggacgcggaatgagaacatcgtcattcacaaaaaattccctgccgtaaaactgttctttcccgataatatattgaatcggaataccttctttatgcatctccacgtgccgtctgaatcgataaagctcgtcctcgccgacgggctcctgcagacttgcgagaagcttgctccgatccattccggtatcatttaacagcagcagctcggccgcgtttttttctcttcccgcttcggttaaataagaagaagcccagcttagggcttcaaaaacggtcttcatcttaattttccgcctgctggagcttgcttgactggtcttctacgattaacgcttcaactacttcatcaagcttgccttccaggatttgatccagcttttgaatcgtcaggccgatgcggtgatccgtcacacggttttgcgggaaattgtatgtgcggatacgctcggaacggtcgcctgaaccgacggctgatttacgggtctgatcatattcagcctgagcttcctgctggaatttgtcatagattctggcgcggagcaccttcatcgctttttctttgtttttaatctgagatttttcatcctgacaggaaacgacaacaccggtcggtaaatgcgtcaggcgtacggccgacatcgtcgtgtttacgctttgtccgcccggtccgcttgatgcgaatgtatcgacgcggatgtctttttcgtggatgtccacttctacttcttccgcttcaggaagacacgccaccgtcgccgtggatgtatgaatacggccgcctgattccgtttccggaacacgctgtacgcggtgcgcgccattttcatacttcagcttggagtatgcgccttttcccgtaatcataaagatgatttctttgtaaccgcccgttccggtcacgtttgcttccatgacttcagtcttccagccttggatttcggcataacgggagtacattctgtagagatttcccgcaaacagcgcggcttcttctcctcccgctgctccgcggatctccatgattacgtttttgtcatcgttcgggtctttcgggatgaggagtactttcaaacgctctgataaggtttccgtctctccctgcagttcggagatttcttccttcaccatttctctcatatcggcatcaagcttttcctcaagcatcgctttcgcatcggcaagctgttctgatgcgtctctgtattgtctatagacttcaacggtttcttgtatatcagattgctctttcgaatattctctaagctttttcggatcgttgaccacttccggatcacttaaaagctcatttaatttttcgtatcgttgttcaattgactgtaaacggtctaacacggtcttcacctctgttttcctgtgcgtaacattctcattatagtatagggcttatcgccagtcaaaagcaattcgcctctgttatactgaagcaaaaaaggaggggcggatatgctgaaatccatccaccatatagcaatcatatgctctgattatgaaaagtcgaaagctttttacaccgagattctcggtttcggcattataaaagaaacataccgaaaggaacgggaatcttataaacttgatcttgcgctggacggcgcgtacgcgattgaattgttttcctttcccgatccgcccgaacggccgaccagaccggaagccgcaggtctccggcatctcgccttcaccgtaaacgatcttgaagcagccgtcagggagctaaaggaaaagggcgtcggcacagaaccgatcagaaccgatccgctgacggggaaacggtttacctttttctttgatcccgacaagcttccgcttgaattgtatgaagcgtaacgttttttgaagaaatgccgctttctttggcgaattccttcttgttttgtctaacatgaagggaacgccgcctcatggtcgaatacctagcaaaaaggaggtatgtgatcatgaatacaaacatggccgcgaaagagctcggcgtctccgcaaaaacggtgcaaaggtgggtcaagcagctgaatcttccggctgaacggaatgagctcggacattattcctttacacctgaggatcttgatgtgctgaaatcggtcaaacggcaaatttctgaaggcactgcccttctggacgttcaagtgccccggcagccgaaaaaacggacgggcttcattttgcagcgtccgaaaatcaatggcggcgctgaacaaaggttggcagagctggagcgcaaactggacattctcacgaaagagaaacaaggtgagagccatctgctttcaaggatagaggagcttgaacgccagctgaaacaaaaggcggatgaaggggtgtcttatcagcttcttcagcacaggcgggaaattgacgacctcaataccgaattgcagacattggcctcccgcatccaggaacttgcccagacagctcccctctcagaaacagccgcttcttcagaacataagaaacccagaaaaaaaacgagattttcgccttttaaatttcaattctaatcaaaaaagctccctgaaacagggagcttttcattatgcagtcagcgcaatgatgatcggcagtgagatgagagataaaatcgcactgatcacgaacgcggacgcagtttcttcctcttgtttttcgaaacgtgtggcaatcatcgccgctaccgcagatccagggaatgcaacgagcaataccgctttagtgatctggtcagccggaagtccgactgcaagagcgatcaagtacatcagcgcaggctgaacggcaacttttaacaaagcgataccgaaagccggcagactgagcttaatgttgcggataccgacagttacaccgacggcgaagagcgcaacacctgatgttgtgcttccgagctgatcaagcattttttctcccaagccagggagtgttacaccgcagagtaccagaatgatactgataagcggtgcagccgcaagcggttcggaaagaccgtgaagaatagacttaccagtcattttccagaagttctcgttttcagtgtcttttttcttagatgactcaccgacagtagcgataatgatcgcaagcgggtcaagtatggcgttaaccacgatacccgtaacggcgataggaatcgctacttcgcttgctccgaataagcttcctagtacgggaatacccataaaagcaaatgtcggctgtgcagagtttaaagaaaatacagatgaattcgttaaatcatacttgaagataaatttgcaaaccaacagaatgacgataaagaatccgacaatcccaatgatcaaagcgaccatcaaaggaacctgtgataaaaacgcacttcttgaagtggttaaaatacttgcgataaaatgcgccggaagcgcgtacttcgtaactaaggtgcttaccccttttgctgacttcgcgtcataacttccgaagcgacctgcgaaccatcccagcacgatcacgaaaaagatcggcgccaggaggattaaaatatctaagaagctcaaaatattctcctccaaatccttaatgtccgtatactttagcctttacataaaagctttccctcggactgtaaaattaatcgtaaaaattatttagcgacaacttgtttatattgcggtttccacattgcatcaagaacggcttgttctacattttcaggaatgcggtttgccacgccttctttaatggcagtttccgctacggcgatcgcaactttaattgaaacttcttgtaagtcgctcatgctcggcagaaggcctgcacccggtgtttcaaaatcaacgctttctgcgattgcgtcagcagttgccgcaaacattgcaggagtaatcactttcgcttctacaacgattgaaccgagaccaagtccagggaacgcgaatgcgttgttagattgtccgatttcatgagaaacgccattgtactctacattgtcaaacgggcttcctgtcgccacaagcactttgccgtcagtccatttgaaaagatcgctaggaacggcttcagcaagcggtgtcgggttagacatcggcatgatgaccggacgctcaacgtgttttgccatttctttgacgatttcttcactgaacgcgccgctttggcctgatgtaccgattaagattgtcggtttcgcttgacggatcacttcaatgaaaggaatttgtccattttcatcgcgtttccaatctttaatttcttcagctgtgcgcaggtacggctcttggaaatcaagaatgttttccataccttcaattaacaagcctctgtagtccattgtgtagaacgctttgttggcttcttcttcagaaagaccggcaagcaccatagtgtcgcggatttggtcagcgattccgattccggcagatcccgcaccgaagacaaccacacgctggtctttaatagacgcgcctgttttcttcatagccgcaagcacacctgcaagcgtaatcgcgcctgttccttgaatgtcatcgttgaatgtaagaatttcatggttgtatttcttcatgatattgcgcgcgtttttgtttccaaggtcttcccagtgaagaagagctttagggaaatatttaagcgcagcttttacataagcgtcaacgaaagcttcgtaacgttcgccttggatacgttcatggcggttaccgatgtataaaggatcgttcagaagtttttcattgttcgtaccgacgtcaagaacgacaggaataacacggcttgggtcaataccggcggcagctgtgtataccgctaatttaccgatggcgatgttgataccgcctacaccccagtcaccgattccgaggatgctttctgagtctgtcgcaacgatcagatcaatatctccggcagtggcatgaaggttttcaaatgcctcttcaattccttccacgttatcgatagaaaggtaaatcccttgaggtcttctgtactcatggctgtattcttgaatcgcttcaccgacagtcggtgtgtaaacaaccggcagcatttcacgaagatggttttgaagcaatttaaagaaaagaacttcgttacggttttgcaaatcattcaaatatacgttttggcgaaggcggtccggctgagcttgaaactgctcgtatgcgcgttttgcctgctcatcaagagacagaattgtcggaggaagcagcccgtctaatccaaggctttttctttcttctgctgaaaacgcaacacctttatttaaagtagggatagatagaacttcttttcctcttaaagtagtttctaagttgccttccttcgttactttaatattattcaagaaaatctccttctttcttcaaatagttaacaaagttaagtaattacccattttggctagtgtgatcgcgatctgctatatctttttttgacaattattcgaacaatgtctcataactatttacattacttagtcattttatgcctgtaaaaatgaaaattcaagagatgaaaattacttaattttttcatactcttttttaagttatttaactacaatttttgaaaaaacgtcaaaaaaacaccggattttttaccgatgttttcatgaaaagggttatttatcagtctgtttttttcggcacttcgtgatgatgcctgcatctcgcttcgtatgactccgacgcgccgactaaaatgaccggatcatcataggaagcgggcttcccgtcaatcaaacgctgcgtacggcttgccggcgacccgcaaacggagcagaccgcctgcagcttcgtcaccgattcggcaaccgccatcagattcggcaccacgccgaaaggctctccccggaaatccatatcaagtccggccgcgatgacacgatagcctttatccgcaagcgaggataagtcgccgatgatcgattcgccgaaaaactgcacctcatctaccgcgatgacgtccgtgctttcactgatatgatcccatatttcagccgaagacgagatgacgtggcttgtcatggatgtgccgttgtgagaaacgacggcctcctcactgtagcgattatcaatggcaggtttgaataccttaacctcctgcttcgcatatgtcgctcttttcactctgcggatcagctcttctgatttcccagagaacatgctgccgcatatcagctcaagccatccgctttgcttcattatgtacataggctatccgctcccctttttttcctgtttatgggcataaaaaacaggcaagaagcaattcttgcctgcctgtaaaatctattattacttaagaccgtattttttgttaaagcgatcaacacgaccatcagcagaagcgaatttttgacgtccagtgtagaatgggtggcattcagagcaaatctcaacgcgtacctcttcttttactgagcctgtttcaaattcatttccgcaagcgcatttaactgttgcttttttgaaattaggatgaattcctgctttcattgtatccatctccttccgccctgaatcccgtgtggaaacagagttattattccggagtaatccggaacgcatatgagagaattatatcagtcatttactgcatttgcaaatacattttttatcagcggcgggctgatgatgaaaggtttgcctgcttccattcttggttgatcagatcgaagaattcctgattcgtttttgtttttttcatttttctcataaacttctctgcgaagtccggagaatcagacatcgatttgcggatcgcccatagacggtcaagatgctctttcggcacgagcagctcttccttccgtgtgccggagcggcggatatcgatcgccgggaaaatccgtctttccgcaagagaacggtcaaggtgaagctccatgttgcccgttcctttaaactcttcatagatgacgtcatccatccgggagcccgtgtctacgagcgccgtcgccaaaatggtcaggctgccgccctcttcaatgtttctcgcggcaccgaaaaagcgcttcggacgatggaacgcagccgggtcaatcccgccggaaagcgtacgtccgcttggcgggataacgaggttgtaggcccgtgccaggcgggtaatgctgtccatcagaatgataacgtcttttttatgttcaacgagacgcatcgcccgttcaagcacaagctccgctaccttaatgtgattttccggcacctcatcgaacgtcgagctgacgacatcgcccgctacggaacgttcaatatccgttacttcttccggtctttcatcaattaagagaacaatcaattcagcgtcaggctgatttgtcgtaatgctgttagcgatttctttcaacagcatggttttaccggctttcggcggcgctacgatcagaccgcgctggccgaaaccgacgggagccatcatatcgagaattcttgttgagagataattcggtttcgtctcaagcaccatttggcggtccggataaagcggagtcagcgcaggaaaatggacgcgctctttcgcagattccggatcatctccatttaccgcttcaacgtgcaaaagtccgtaatagcgttcgttttctttcggcggacgcaccttgccggatactttgtcaccgtttcttaaatcaaagcggcggatctgggaagcagaaatgtagatgtcttctgagcttggcgagtaattaatcggtctgaggaagccgaatccttccgattggatgatttcgagcacgccttccataaacagaagatcctcctgctcggcgttggctttcagaatggcaaagattaattcttttttagtcagtttgctgtagtaggagattttataatgtctggccagttcatatagttcttttaatttcatattttccaaagaggaaatagatacgtctttcataaaaacaccacgcttttcatagtcaatgtattgctgttttcattcaaatcggctgcttcgcatgattccgccaaagcacattcttttataaaacgttcaggaacttctatcggtaacacttccacccatgatcggcgcttttttaaaaaaggaatgtcttaatgagttttgaaggaagcgaggacaaaaacttgagaagatcaatatttatatcgtctgtatgcggtagaatttgaaaatttcccagtactcaaaagaaggaatgacacagaaaaatcgcagcactctttatttttacctcatttcaaaaaattattcaacttaaataatgctttgacatataaatgatagggttgactctttattgcaaaagaaaagcgggactttccgtcccgcttttatctatttatggccggatcacaagatttggttttttcttcaggctgtgtcttccgtcaacgaatcggaccgttcctgatttcgcccggatgaccagactttcagtcgtgccgacggagcctttgaactgaacgcctttcagcagctctccgtccgtgacgcccgttgcggcaaaaatggcgtcatcccctctcacaaggtcctccatccggagcactttggatacatcaaggcccattcgctcacagcgggcctgctcttccgcactttgcggcagaagcctgccgatgatttcgccgccgagcgcttttaacgcaacggcagacagcacgccttcaggagccccgcctgaaccgaagagaatgtctactcccgtatggtcaaaggccgtattgatggcgcccgcgacatcaccgtcgttgatcagtttgattctggcgcccgcctcacgcaattcagagatgattttttcatgtctgtcacgatttaaaatggttgccacgacatcttcaatgtctttgtttttcgctttcgcaacggcttttaagttatcaatgacaggcgcttcaatatcgatgcagcctaccgcttcgggaccgaccgcgattttttccatatacatatccggggcgttcagcagtgttccatggtcggcgaccgcgatcaccgtcagcgcattccagccgccgctcgctacgatgtttgtgccttcaagaggatcgacggcgacatcgacgcgcgggccgtatccgtttcccagcttttcaccgatgtaaagcatcggcgcttcatccatctcgccttccccgatcacgaccgtgcctttcatcggcaccgtgtcaaacacgtcacgcattgcgcttgtcgccgcatcatcagcttcatcttttttcccgcggcccatccatctggcagatgctaaagccgccgcttcagtgactcgaaccaattccatcgataagcttctttccatttcaacacgatctcctctcaaaagtccgcatttctatgaattttggagctgttctatctcttcgtccgtcagcctttgccgccagattgtggcgcccagaccttcgagttttttctcaagattgctgtagccgcggtctaaatgctcaagaccggtaatttcggttacgccgtcagccatgagcccggcgacgaccagacaagcacctgcacgcagatcgctcgcctttacttttgcgccctgaagctcggccggacctgtgataatggccgacctgccttccactttcatgttggcccccatccgtctcagctcatctatatgtttaaatcgggccgagtagatggtgtcggttacgacgctcgtaccgctggctctcgttaacagagatgtcatcggctgctgaagatcagtcgggaatcccgggtaaacaagcgtttttacgtcgaccggttttatctgcttctgcccgccgagcataagaagctgatcgtcactcgtctcaatgtgaaaacccatttccctgagcttcgccgttaaagactccaggtgagtcggtatgacattatcaataatgacttctttccccatcgcggcgccggcgatcataaaggtgcccgcctcaattctgtccggaatgatcgtatgcctgcatccatgcagctcttttacgccgtcgattctgattacattggttcccgcgcctttgatctttgcgcccatgctggtgagcaatgtggcaacatcaataatctcaggttccttggcggcgttttctatcacggttttaccttcagccagtacagcggcaagcatgatattgatcgtcgctccgacgctgacgacatctaaataaatccgtgcgcctctcagcctttcggcgcgcagataaatcgcgccttgttcattggtgacttccgccccaagcgcttcaaaccctttgatgtgctggtcaatcggccgcggcccgagatggcatccgcccggcagtccgatgaccgcctgtttgaagcggcccagcatcgcgcccattaagtaataggaagcgcggagttttttcactttgccgttgggaagcggcatgctgatcatcggggaagggtcgacgaccatttctcctttttcaaaatggacgtttccgccgatttctttcagcaggtcacgcagcgtttcaatatctgagatctccggaagcccttcgatcgttacttcggaatttgccagaatggttgcgggtatcaatgcgacggcgctgtttttcgcgccgctgatatgtacggttccgtttaacggatcgccgccggcaatattcaacttttccatgatagtctccttccataagaagatagctgcggagcgtaaataaaatggcattttattctgtctctgcaaataaagctcttgtccaaaatgtagccaattcgaagagaaagaatacaaggacattataaaataacaggaagaaaatagcgaagctttgcggggcatttttaacacaggatgcacagaggcccgccgggttcacattccggggaaacacactcttcactttgatacttaaggcccgctgccaaacaggaaaacataagggtgcggcaaacggatgcaaccggtttgccgcccttttcacccttatttattccagtctgccaagaattgctcgatgcctttatccgttaacggatgtttcgccagctggtgaatgactttcagcggcatcgtaccgatatgcgcaccgcgtaaagcggcttcagtcacgtgctgcgcatgacggatggaagctgcgatgatttgtgtatcaatgtcatgaatgtcaaaaatctgtcttatttctgaaatcagttcaagaccgttatggccgatgtcatccagacggcctaagaacggagatacataagtcgccccggctcttgccgccaaaagcgcctggttggcactgaagatgagcgttacgtttgttttaatgttcaggtcgctcagcgcttttacggcttttaacccttcagacgtcatcggtattttcaccgtgatattcggtgcgattttcgcaagttctttaccttcttcaatcatttcttcagcattcagggaaatgacttccgcgcttactgatccgctcacgacttccgtaatctcacgaagtctgtcatggaaagacacgtcagcttctttcgccactaaactagggtttgtcgtaactccggcaagaacgccaagttcataagcttctttaatctcgtcaatgtttgctgtatcaatgaaaaataacataaggaaagcctccccagtaataaattttcagaactgtaaaacatgattgcgctttctaaaggtaagacataaaaccgcctgtcaatgctgtcaggcggtttatggatgttacattggattaagcttggtttgaagaaccgaactcacgcattttgccgataaccgtttctttgatcgcttcacgagcaggtccaagatatttacgaggatcgtattcgttcggcttagctgccaatgtttcgcggacagcttttgcagaagaaatttggttttcagtgtttacgttgattttagccgtaccaagtgagattgattttttaatgtcggcagtcggaattcctgtaccgccgtgaagtactaacggaaggccggttgatttgccgatatcttccatttctttgaaaccgaggttcggttcgcctttgtaagggccgtgaacagaacccagtgcaggtgcaaggcagtcgatgccagtgcgctctacaagttcttgacactctttagggtcagcatagattacgccttcagcgatcacgtcatcttcctgtccgcctacagttccaagctcagcttcaactgaaacgccgtggaaatgagcaagctcaaccactttagctgtagttgctacgttttcctcaaacgggtggtgagatgcgtcgatcattacagaagtgaagcctgcatgaatcgctttcgcacaagattcaaagcttgaaccgtggtctaagtgaatggcgacaggaactgtcactttgtattcttccataagagctttaaccatggcaaccactgttttgaagccgcccatgtagcgtcccgcgccttctgaaacaccaagaataaccggggatttttcctcttctgctgcttgtaaaatagcttgagtgaactcaaggttatttaagttaaattgtccaacagcatatcctttttctttagctgtattcaacatttccgtcattgaaactaaaggcatgtcgaaagtcctccttatgtagcctgatttgcttcttctcgaaaaaagctttccaactatagcatgaccataaaaacctgtcatatgtaaaacaacagatcgctttttctccatctctaggataccaacttttcgacaaatcggcaacacaatgacataattgtttctaattttattaattcgattttagaggtaaatattttttcaccgcgtctctgatctcatcaatgtcaaaaggtttcgcaaaatgagtcagcgctccgagctcttttgattccttaatcatatcgagttctccgtaagcggtcatgataatgacgcggatagattcgtcgatcatcttcatgcgcttgagaatttcgattccgtccatgccggggattttcatatctaaaagcacgagatcgggccgttctttcgttacgatgtccagcgcctgtatgccgttggcggcctgaaacgtctggtacccttctttatgaaacacttcattgagcaatatgcgtataccgtattggtcatctacgattaaaatcttttcattcatcattttacaccccaatattatcattttcgtcaaaaggaagcagttgtttatgtattctgtttgattttcacatttcctttaattataatagtctactttccgacattttctgagcattttctcttttgttgtatactgttcttgtatgtgtaaaggaggtttcactcatgttaaagatatttacaacgcagcttgcaggcattttttcccgcattcaggataaggaatccgaagcaatagaagacggcgcgcgcctgctggcgcaggcagccgtcagcggttataccatttatttatacggcgcaaatgagatgcagggcattttgtgcgaggcggaactcggctcagaaccgatgccttccgtcaaagcgtttccggatacagctgattcgattacagaaagcgacagggtgctgatgttttgttcaggtccgggcacggctgaagaacaggcgctggctcaaaagctttatgaaaaagggatcggcctcgttggcgtatctcctgtcatcaaagatcaaaccgggattgaggaattttgtgatgttcatattgacagcaaattaaaaatgccgcttctgcctgatgaagacgggacaagatacggctttccttcattaatgacaggcctgtatgtctatcacgcactgtcctttacgttaaaggaaatgatgcaggaatatgcctgatgcagaaaaaagacttgccgcttttaaaggaggcaagtctttttttattacttctgttctgcagcttgtacggaagcgccgataaagtctttgaataaaggctgaggtcttgtcggtcttgatttgaactcagggtggaactggcaagcgacataccaaggatggtctttcagctcgatgatttccacaagacggccgtcagggcttgttcctgagaacacaaaaccgttctcttccatttgctgtctgtattcgttgttgaattcataacggtggcggtggcgttcgtataccacttcatccgcatacgcttcgaaggctttcgtgtcttcctgaagcttacaagggtacagtccgagacgaagcgttcctccaagatcctcgacatctttttgttccggcagaaggtcgatgatcggataaggagtggacggatcgatctccgcagagtgagccccttccagacctaatacgtttcgcgcatattcaatggatgcaatctgcataccgaggcagatgccgaagaacggaattttattctcacgcgcatacttggcggcgatgattttcccttctacaccgcggtctccgaaaccgccgggcacgatgattccgtctgtgccgctagtcagctcttgaatattgctttctgtcacttcttcggcgttaatccatttgatcttcacatcagcatcaaacgcatagccggcgtggcgcagtgattcaacgactgaaatgtaagcgtcctgaagctcgacgtatttaccgacgaggctgattgtaatggttttagacaagtttttcactttcgtgacaaggtctttccattccgtcatatccgggtctttgcattctaatttcatatgatcgcagacaagcttatcgagtccctgctcctgaaggttaagcgggatggagtaaaggttgtccgcatcttcgcactcgatgaccgctttcgtgtcaatatcgcagaagagcgcgattttatctttcatatcttgagaaatcggcatttccgtgcgcacgacgatgatattaggctgaataccgaggcttctcagctcttttacgctgtgctgcgtcggttttgttttcagctcgcccgccgctttgatgtacggaacaagcgtacagtgaatgtacatcacgttttcatggccgatgtcgcttttcatttgacggatggcttcaaggaacggaagggattcgatgtctcccactgttccgccgatctcagtaatgactacatctgcgtttgtttctttgcctgcacggtacacgcggtctttcagttcatttgtgatgtgcggaatgacctgaaccgttccgccgaggtagtccccgcggcgctcttttttcaatacggcagaatagattttaccggtcgtcacgttgctgaatctgttcagattaatgtcaatgaaccgctcataatgccctaagtcaagatcagtctcagcgccgtcatcggtaacgaatacctcaccgtgctggtacgggctcatcgttcccgggtcaacgttgatataagggtcaaatttttggatggtgacgctcatgcctctgtttttcaaaaggcggccaagtgacgcagccacaattccttttccgagtgatgatacaactcccccggttacaaaaatatatttcgtcatttcgtttgctcctctcttcggtctgcgctacattccttaaaatgtgccgttttatagaaaatcatttcactaaaaacaaatgatgtgtaaaagaatttgggagatgaaaataagaaagctccctttcaatttcttgaaagggagcgtagcactcttatgaattctcttctttttgaagagcccaaaatacatactacatagttcgacaatgaaagtcaagatcgttttgctgatataaaatcagtctttgcgatcctcttcctcatcatcataatcttcctcatcttcttcaaccatctcgtcttcgatctcaagctcgtcgtcatcttcttcatcgatatcttcgtcgtcaaagctgtctgcttcaaggtcaatatcttcttctatttcatcgagatcgatgtcatcttcgtcaacttcctcgaattcatcaaggtcgagatcttcctcaacgacttttttcgcttttttctttttcgcctttacagtcggctgtgtttcttcgtccagctgatcgtacggataccagctgcgaagcccccacgtctggtctgacagagcaataaagcggccgtcaatgttcaggtctgtataaaattgggcgatacggtcgcccagttcctctttcgtaacaccgagcaaggagatcatttcattcagcagctcctgaaacggaaccggttttttatgttctgagaaaatttcgtgagcgatttcaactaaagccatctgcttcagctgttcctgagaatattgtttgatactcaaggtcggacactccctttctattacttatatgtatctgtttctatcctataataagaacgaatttgtattgttttgttcataaaccatacctctcattataaacaaattaaaacagaatatgctacccttaacagcgtaatttaagaaattttagagccgtcccttcataaatcggctgatgtgcgaaaacaaagccgccggcatatgcgccggcggcccgcttctttctataaagactcttgtttttcggcgccgaatacagacatggcgagcaattcactgacatcataagtgccgatcgcgtcttcggcttctttcgctttcgtaccgtcaccgagcatggtcagacagtaaggacatccggagctgatgaccgtcggactgacagaaagcgcctgctcagtccgggccgtgttgattctcgctcccgtttcttcttccatccacatgagccctcccccggcgccgcagcacatcccgttttcgcggctgcgctccatttccttcaattgaacgcccggaatggcttttaagatcgctctcggcggctcatacacttcattgtatcttcctaaatagcacgagtcatggaaggtaatcgtttcattcaccgggtgaagcggttttagtttcccctgtgacacaagctcggctaataattcagtatgatgatagacttcggcccggaatccgaaatcaggatattcatttttgaacatattataggcgtgcggatcaatcgtgacgatttttttgatcccgtgtttttcaaattcgccgatgttgtgttccgccagctcttggaacagaaactcgttgcccaaacggcgcggcgtatcgcctgagtttttttccttattgccgagaatcgcaaaggatacgcccgcttcattaagcagctttgcaaatgagacggcaatcttttggctcctgttatcgtaggaacccattgagcctacccaaaacaagtagtcgaacgctttgtcttgttttttcatttctttcactgtcggaatctctgtatcagcctgctccctccagttctcccgctctttccggtttaagccccacgggtttccctgtctttcaatgcttgtcatggcccgctgcgcgtcgctgtccatcttcccttccgtaagcacaagatagcggcgcagatcgataattttatcaacgtgttcattcatgaccggacattgatcctcacagttgcggcaagtggtgcacgcccaaatctcctcttccgtgatgacctcgccgattaagctcgggttgtaatcaatggctgccgccgcttcacgcgatcctccccctgaggaagccgcggcgagctgattcgctttcgtgtgctgaaaaacgggcgcgggcacccacggagattttgacgtcacggcagcgcctttttccgtcaaatggtctctgagctttaaaatgaggtccatcggcgagagcatcttgcccgtaccggaggccggacacatatttgtacagcggccgcattcgacgcaggcgtaaaggtcgacaagctgagagcggcggaagtcttcaatctttccgacgccgtagctttctttcgtctcatcggtgaaatcgattttttccagctttccttttgaatccagcctgctgaggaacacattcgccggacccgcaattaagtgcgcatgctttgattgcggcacgtacactaaaaagctgagcaaaaacaaaagatgaagccaccatgaaacataaaacacggcggcggccgccggcgctgaaagaccgccgagcacaatcgcaatggaggaggcgatcggctccgtccaagacagagaatgatcgtgccataaaaggttcatggcgttcccgagaagcaccgtcaccatcagtccgccgataaacagcaggacaagccccgctttaaacccgcgtttcagtctgacgagtttttcaatgtagcgccggtaaaacgcccagactacggcgattaaaatcagaaacgtgacgatttcctgaaaaaaagtaaacgccggataaagcggaccgaacggcagatggcggtcaggaagcagccctttcagaataaaatcaattgcgccgaactgaacgagtataaaaccgtaaaaaaacagaacgtggatgatgccgctctttttatctttcagcaattttttctgtccgaatacattcacccatatcttctgaagacgttctttcaggcgtttatcaaattcttccctttggccgagcttaatataagcgatcctcgttctgatcaggtaaacgaataaataaacggcgtaagcggttacagctgaaaacagcagcgcgtttaccatgagaaatgcgttcatcttgtctccccctttgttctgatacccctcttcattgtcatatctttactttatcataaataatgaatgagtgttcagtcaataattaaattcacattctcagggcacactacgaatacttcggaaaggagcgtcggtatgaaggtcatttttgtgttgcttgtcatttttatcatattgatcgcacttatgctgcttgatatgctgcttggccgggcggcgtacaaaaaacaggcgtatgagcccgtttttgacccgaaaaagagtgatatcacactcattcactgcggcagcgagcttgtgcggcagatgacggctgatatccgccaagccgtctcttctattcatatgatgttttttattatgaagaacgatcaagtcagccatgagatgtttgatttattgaaggaaaaggcccaggccggcgtctccgtatatctgctgctcgactgggcgggcagccgccaagtgaaaaagccttccattcaaacgatgaaaaaagccggcgtccacgttcattttctaaataaaccggcatttccgtttctttttttcaggctgcaaaaacggaatcaccggaaagtgaccgtcattgacggcaaaatcggctatgtcggcggttttaatatcgctgaagagtacctcggcaaaaaagcgaagttcggaaactgggaggattatcacctgcggatgaccggcgaaggcacggcggatcttcagactctttttgtaagcgatctgaaacgaaacaccggaaaggcacccggatcacccggggtttatcccgcattatccgaagggaatatctctcataggacatatgcatctgacggtttttcgcttgaatcgcattatgaaaactgcatccgtaaggcggagaaaaaaatcattatcggcacgccttattatgtaccgagcaaaaagcttcaggaagcgcttatttcagcctgccgaaaaggcgtcaaagtcatcttgatcgtgccgatgaaatcagaccacccgctcgttcgggaaacagcttttacctattatcccgagcttctgaaggccggctgcctcatctatcggtattatcaaggcttttatcatgtcaaagctttcattattgatgaccgcatcagcattatcggcacgccgaattttgataaacggagcctgttctggaatgaagaggtgaatgtcatcattcatgatgaagcctttacaaaggaagtgctttcaaccataaagcaggacatcgaaaaatccgagcttctcacattagaaaaagtgaaacagcgctccgtcagacagcttcctgcagaatggctgggaaaggccatatcttactttttataaaggagaaaccatatgctgttcagattcggattcgtcgcaaacgccatgtgcctttgggacgcgtcacccgcaaaaaccttaacatatgcgcgctataccaagctttcccgcagtgagcggaaagaggccctgctttctgtgacgaaagccaatctcaccaatacgctgcgcaccatccactatgtgatcagccacggcatcccgctgtacaggttctcaagctcgattgtgccgctcgccacccatccggatgtgctgtgggattttgtcacgccgtttcgccaggagtttcgtgagatcggcgggctggtcagaaaatatgacctcagaacgagctttcatccgaaccaattcacgctttttacaagcccgaaacaggagattaccgcaaatgcggtcaaggatatggcctatcattatgacatgctggacgcaatggacatcgcggaccgttccgtcatcaacatccatgtcggaggcgcttacggtgacaaacaaagcgcgcttggccgtttccgcgtgaatctgaaagaacttcccgatgtcatcaaacagcggatgactttagaaaacgatgataaaacatatacgtccgaggaaacactcagtatatgtgagcaagaaggcattccgtttgtgtttgattatcaccatttttacgccaatccgaccgatgacgctgatttagatgacattcttccgcggatgatcaaaacatggcagcggatcggcttaaagccgaaggtccatctctcctcgccaaaatcagaatcagccgtacgcagtcatgcggactatgtagatgcgaattttattctgccggtgctggagcggttcagacaatgggatacggacatcgattttatgattgaggcgaaagagaaagaccgggcgctgctccggctcgtcgaagaattaagcgccatccgcggagtcaaacgcctggcgggcggagtgctgaagtggaaggcataaccaggtttatcacccgtttatatggggaatttccgaaataacagaccatcagacggaggagaaaacatatgaaaaacattacatctttgaaaatagttgctaagaagttcactttacgtaacatgcttcagctttatcagctttgccacacgggaggccacgagctgtatatctactctaaaaaaacgatgtgcaaaatcaaagatatcattgagctggaaacgttcagaatggcccataaagaacaagaatatttaattgtagtggaaggaaagaaagcggtgcagcttgttgaccgtttcaaacatatcatcgaacctgcgcaaaaagaagcccattaaatacggactacataaaaaaaggatagacaggaggctgcccggcccccgctcgtctatcctttttcttttattaatgaatcagctcgccgaattgggcctgatgaagtctctggtacatgccgccggatgccagcagttccttatgatgaccttgttcagcgatgccatctttcgtgacgacgacgatccggtccgcatccttaatcgtagccagccgatgggcgatcacaagcgttgtgcgtccttcagacagctcttgcagcgatttttgaatggcggcttccgtttctgtatcgagggctgatgtagcctcgtctaaaattaagatcgacgggtttttcaaaaacattctggcgatggaaagccgctgcttctgcccgcctgacagcttcacgccgcgctcgccgatcaccgtgtttaaaccgtcgggatacccgtttaccaagtcctctaaatgcgcctggcggacggcctgccagatttcttcctcagacgcgtcgagccgcccgtaagcaatgttttcccgcaatgtgccggaaaacagaaagacatcctgctggacgacgccgatttgtccgcgcaatgatgacagcgtcatgtccttaatatcgattccgtcgatggaaatcacgccttcagacggctcataaaagcgcggcagcagacttgtcagcgttgattttcccgctcccgaaggcccgacgaatgcgactgtctccccggcatgaatagacaaattgattcccgacagaaccggactgttttcttcgtaaccgaacgacacaccatcataacggatattcccttttaaaccggacacatgtctcgcgttcggggcgtccttgatatcaggctccgtttccagtatttctataaagcttttaaaaccggcaatgcctctcggatacatctcaataatcgcgttgattttatcaatcggacggaacagaacgttcgtcagcagcacaaaagcgacgaattccccgtaagataacgatccgcggatcacgaaccatgtgccgcacaataagacgaacagcgtgacgaatcttgtcagcatgtaactgatcgagccgtttttcgccatgattttatatgacgtcagctttgttttgcggaaacgctgattgttcacgtcaaaccgctgcgtttcaaacgcttcattgctgaaagcctgaacaagacggatgccgccgatattgttttcaaccctcgcgctgaagtctccgacgtctttgttcagttttgtaaacgcagaggtcatttttttattgaaatacaaagcaagccaaatgacgaccggcataatgataaaagtcaacagcgcgagctgccagttaataaacagcatcacaccgaacgcgcccaaaatcgtcatgatcgcgataaacaggtcttcaggcccgtggtgggcggtttctccgatatacatcaaatcattggtgagcttggacattaaactgcccgttttgttgttatcgtaaaatttgaacgaaagcttttgcagatggtcgaaaagctttttccgcatatcggtttcaatgttaatgccgagcatatggccccaatacgtcacaacatactgaagtgccgagctgagggcgtagaccccgaataaagcagcggaagtcaaaataatcagactccaatcccgccccggaagcaatgtatcgataaagtaattgacaatcagaggaaaactcagctccatcaatccgccggcgatggcagaaaagaagtcgagaaaaaacagctttttgtacggtttataataagaaaaaaattgtcgcagcacgattccgtcctcctagtgcctcgttcttaatgataatatttctcaattatactatacacaaggagttttaaaagcgttttttataacacgccggaaaataaccgtgcgaaggattccttcgttctttcccataatgtgcgcttatagaaacggacggggctgattttttcagactccttcatatcctccagataatgcgcttcaagatctttgatcgcctcttgatctgtaaaaaagacattgacttcaaagttcagctgaaagcttctcatgtccatattcgccgtcccgacagaggcgaggtttccgtcagtgatgagcaccttttgatgcataaagcctttttgataagaatagacttcgattccttcgcgaagaagctcggggaaatacgatctcgtcgcgtactgggttaaaaatccgtcattggtttccggcaccatgacacgcacccggacgcctctggcagcagcctcctttagcgctgtgcggatcggctcattcggcacgaaataaggcgtcgcgatccatacagacgattcggccgccgctatcatggcataatacagatcgctcatccgctccttcatatcggggcctgtcggcacgacttgatagacgccgccgctttctgccgcaaccgggcgggtatatgctttccgatcaatcagcacctcatccgaaacgtattcccaatcaagcataaaaatgctgtggagcgtctgaacgatttctccttcgactttcatatgagtgtcccgccaaaagccgacatcttggtctttgccgatatactccttgccgacattcagcccgccgacaaaaccgactttcccgtcaacgatgacgatcttgcggtgatttctgaaattgaatttttggttgaaaaaaccgtatttcagcggcagaaacgggacgatgttcacgcccgcgcgtttcagttttttaatatcttttccggccagcttcaggctgccggccgcgtcgaacaaaaaccgcacttccacaccttgacgcgccttttccatcataatgtccatcatcttgtgcccgagcatgtctgatttgaacatataatactcaatatgtataaatgacgcggcctcccggagcgcctcaaacagctccggaaatgtttcatccccgtttttgagcaccttcagcctgctttttgtattgatattcatatgggacgccttgattgaatattgaaagaaacgcttctgatttcctttcagcccggtcagatcgggagtttgttccatatcaaatatcgttctcagcttttcccggttgtatgtccgtttcgacctgaacagcttgcctttttcataaagctggccggaaaaaaggtaaaataagtacccggcgatcggaaaaaacacaagaatatgaatccataacagcgtgtgctgcgaggtgcggttttcaagaattaacgaatagatgctgaacaaaataatgcttgcatagcaaagcacccctccgtaaaactcaagcctggaaaccggaaaaaaccatatgacatatgctccgataagcatcatatataaaaagcaaaattccagtctccttttcagcatcccgactctctcccatctgatccgatatctctgtataccctctgttttccggcctgtaaacatatgaaaaagcctctccgcatgagcggaaaggcttatgatgaagcttcctgtgattggccgggtgtgatgttctgaagcaatgccggattgagcgagcagctgcctttgattttatttttgaagatgccgatgatcagaccggtgaccgctatcgacactaaggagaagagccctttcagcaacccgacggaaaaaatgccggccagcacgacgccaaaatcgaagaggaaattaacggcacccggattccatccgcagcgcttttgcagaaataaagcgaggatattggcgccgccgagcgatgcctgatgataaaacatgagcgacaagcccaacccgatcagcgcccctccgcaaatcgccccggcaagcggtgaaacagagaccggcggcagccagtgatccgcgccggtaaacagagtcagtactgtgactgcaaaaacggtggatagagtgaatttgattcccattctgatgagagaaaatatataaaacgggatattaatcagaaagaagataatcgcaaacgaggaatgaaacaagtatgacaggcttagtgacagtcccgctgtgccgccggttaatacatgagaatgtctgagtgtcaggacgccggcgcttgtcatcagacaggcggctaaaatgaggaaaatccgcttcattcttcactctccttttgttgatgttatttccaaataaaacataacaggaatcccggccgcccagccattaccttggcagaaaatatcttatgtttttattttttcaccataaaaaatccccctcttgcaggggggatttttacgtgcgtttccgatagacaacatagctgcgggtcaaatacttgaggggcaggctgaacacgtgaaccaatcttgtaaacggccaaaggataaaaacgacgtaccctatgatgatatgaaacttaaaccatagcgggacactctccatcaaagaagcgtcaggccggaacaaaacaatttccctgaaccacggcccgactgttgccctgtaatcaaatcctttcgagtcaatgttgaggaacgtggccgcaacgcccgacagcatcatgaacagcagcagaataagcgtcaagatatccgatggcgagctgcttttgcggattcttttgtcaaacagccttctgtacgtcaggatgacaagtccggcacatgcagcaatccccgccggcaggcctgcgccgatcgccattttgtgatacatatgctctgaaatgccaagggaagcatacacgccttccgggatcagaattcccatgacatgtccgccgacaacgcacagcagtccccaatgaaaaagtgtgctgccagcggcaagttttttcttttctaacagctcgcttgatttcgccgtccagccgaattggtcatgctgatagcggtaaatatgaccgccgataaagatcgtcaatacaatgtatggcataacgccccacaggatctgcccgctcatgcctgaacagccccttcttcagtgctttcatgtacaccgatgttttccagtgcggcctgcagtacgtgcagcagctcagcatagatgctgttatttttttcgagacgggaagccagctccctcacattggacaggtatttttcaaacacgcttctcgccgcttcaatctccgcaaccgcagcgaattccagcatcagcggcaggtaatcaggcagttctttctctgtcggcaggaaaccggattgctggtaggtgttttttaaatgcagcaattcaatgccgcgttccctttgttcgcctgagttaaagtaggtgacgtacatattcgttttttttccgaaatcgaacgtatacacatagtgttcaatcagcgattgcggagaaaagccggctgccgcctctaaaaagtgcagcaatttctcccggatctgctgattggtgatgtcatggataagagccttccaatcgggaatctcggctctccactcttcctccggatatgagagaagaacggaaagagcggagaacgtcatttgccggtctgtggtgttcatgttattacacctcatttatgaaaagttagaaacaagagcccgggccgcctgaaaatgataagccgcagctcccttgttcagcatataaatctgacacttcttctcgatggctgctcgggatcacaaaacggtcatcatatttggcgattgccagcagccgatacatgtcttcaatttgctgttctgttaagccgacactggagaccaatgccgggtcgatggatttatttgtctgaaccgccctcatatactggcgcatgacagacattttctttaacgtggatcgaatatgatccgtatcccccgccgttaacagctgcgccaaatagtcaatcggaattctcatttggtcgatagccggaaaaatcgcttccgccgtttgccggctgccttttccttcaaagagattcataatggggctgagcggcggaatgtaccacaccatcggcagcgtacggtactcagggtgaagcggaagcgcaatcttccagtcaatgatcattttatagatcggcgattgctgcgccgcttctatccattcagccgggatgccttgttcttttgcctgtttggcaacctcgggatcattcggatcaagaaaaacgcccagttgggaatggtagagatccttttcattttcaacagaggccgcttcctccactttgtccgcgtcatacagcatgacgccgagatagcggattctgccgacacacgtttcggagcagatggtcggcagccccgcctccaagcgcggaaagcagagtgtgcatttttccgctttgttcgtctgccagttaaaatagacttttttataaggacaggatgagacgcaatatctccatgaacggcatgcgttttgatcaacaagcacaatgccgtcctcctcacgtttgtacatggcgccggacggacaggatgacacgcacgccggattgatgcagtgttcgcaaatacgcggcagatacatcataaagacttcatcgaattctgttttgatcgattcctccattttttgcacgtttggatcttcaagccctgtaatatggccgcccgcgagatcatcctcccagttcgggccccattcgatattcataaaatcccccgtcaaggacgatttcgggcgcgctaccggctggtgttttttctgcgggctgtttgttaatgtttcataatcatagttccaaggttcatagtagtcatcaatcgtcggctggttcgggttatagaaaaggcctgcgagccggtttgttttcgggcctgatttcagttcaagctttcctttttttaacgtccagccgcctttatatttgtcctggtcctcccattgcttcgggtagccgataccgggctttgtttctacattattgaagtacatatattccgcaccggaacggtttgtccacgtgtttttgcaggtgacgctgcacgtgtggcagccgatgcatttatccaagttcatgaccatcccgatttgcgctttaatcttcaagccaatcgacctccttcagcttgcggatgacgacattcagatcgcgctgattccccgtcggaccgtaatagttaaagccgtaactgagctgtgcatagcccccgatcatctgggtcggcttgacgtgaatccttgtcgggctgttatgggtgcctccgcggttattcgtcagttttgtgccgggcacattgatgtggcggtcctgggcatggtgcataaacgccattcctttaggaatccggtgagacaaaaccgctctcgcgacgacaacgccgtttcggttgaagcattcaatccaatcgttgtctttgatatccgtgtcctctgcgtcatctttattcatccacacggtcggcccgccgcggaacagcgtcagcatcggcagagaatcaaaatacatgctgtggacggaccatttattatgcggcgtcaaataattaagaacgatttctttgccctcttgatcaggccgcttgcttaggaacggacggtgctggaggattggtttaaatgtcgccatcgtttcaccgaattccatcatcagttcatgatcgacataataggattgtctgcctgtcagcgtccgccacggaattaatttttccacattcgtcgtaaacggcgagtacctgcgccctcctttttctgaaccggtaaaggccggagaggtgatgaccgttttcggctgggctgtaatttgctcgaacgtaaagcattcttcctcgcgctcttccgccaggtctttcagctccagattggtaatgttttcaagtgattcccatgctttcacggcgacttttccatttgaggtggacgacagggttaaaatcgcttccgccgccagcttcgcttcacttatattcgggcatcctttggcaacgctgtttgaatcggtttctcccagtctctgtttgagtgattcatattcatccgcaatcgaccagctcatcccttttgttccgctcggttttaaagccgtattagggccaagcgcggtcattttatgaaaaatgtgtttgtaatcccgttcaacgacatggatgttcggcatcgtttttcccggaatggcttcacattcgcccttgctccaatcattgattttgccgaatggctgggccaattcctgcatggtgtcatggaggagcggcgtcgcaaccacttctttcaccggctccaaatcgacttcttctgccagatcggaaacggcttttgacagcgccttaaaaatatcccagtctgacttcgattcccacggcgccgagatggccggagcaaatggatgaataaacggatgcatatccgtactgctgagatcgtgtttttcataccatgtcgccgccggcagcacgatatcggaatacagcgccgtacccgccattcgaaaatcaagattgattaacaagtcgagcttgccttccggcgcctgctcccgccatttgatttcttcagggcggatgctgtcgctgtcgtcattcatcagaccgttcgtcgtccccagcagatgcttgagaaaatattcatgccctttccctgagctcgagatcagatttgcccgccatacgaagagattccttgggaaattcacttcattgtcagggtcttcaatcgcgaatttcaattttttttcttgaagccgtgaggccacgtacgcacctatgtcttcaggtgtcgccgcccccgctttctcagcttctttgtacagatcaatgccgttttgattgaatgtcgggtaagacggaagccaccctaatcgcgccgccagcacattgtaatcggcgtgatgcttgtagcgggatgacgcggcgatcggtgaagccaagtcactgatcggctggtcttcataacgccactggtctgtcgcaaagtagaaaaacgaggtgccgttttgcagcttaggcacgccttcccagtcctttgcggttgcaatcgtctgccacccttcagccggacggagtttttcctgccccacgtaatgggcccaacctccgccgtttacaccttgggcgcctacgagtaaaacaagatttaacaccgcacggtaaatcgtgtcggagttgaaccagtggttgatccccgcccctacgataatcatggatctgccgtctgtatcaatcgcattttgggcaaactccctggcaatctgtataacggcttctcttttaattcccgtgatctgttcctgccaggcaggtgtgaacggacggggatcatcataggatgcggctgattgtccgccgatgccccggttcacgccgtagttggccaatatcaagtcaaacacggtcgtgacgtacgtctcttcaccgttcaggtccagttttttaataggaagatcccgctccagcactttgtttccgtcatctgaaaaatacggaatgcgcactgagccgatttcgtcctctattccgagcactgagagacggggctcaatctgttccccggtgtcttcgtcgatcatgtgcagattccatttctgctgcccgtcccagcgggagcccattgtgccttgcggtatggcaaacgcacctgtctgttcattccagaccgccggcttccactgatcattttttgtctgccgcccgatgtcttttgcatgcagaaaccgtcccgctgtatacacgccgttctcttttgaaagagtgacgaagaatggaaaatcggtgtattgcttcgcgtactcaataaaacgttcagtttcttggttcacgtaaaattcctgcaaaatgacgtgacccatcgccatcgcaagcgccccgtcagtcccctggcggatactcagccagtcatctgcgaactttgaggattccgcaaaatcgggactgatcgaaatgactttagcgcctttatagcgggcttccgccagaaaatgcgcatcaggcgttctcgttaacggaacgttggagccccatgtgatgatatagcctgaattgtaccaatcactgctctccggaacgtccgtctggtcgccccaaatttgcggggacgccggcggaagatccgcataccagtcataaaaactgagcattgggccgccgattaacgacatgaatcgcgaacctgatgcgtggctgatcatggacatcgccgggatcggagaaaaaccgacattccggtcaggcccgtatttcatcactgtatacagcagagaggctgaaatcagcttcagcacctccggccattccgcgcggacaaagccgcctttccctcttgcctgtttataggacttcgctttttcagggttttcaacgatcgatttccaggcatccaacggattgtgatgcgcctgcaatgcttcccgccacaaattgatcagtacaccgcgcacatatggatatttcacacggagcgggctgtagatgtaccaagaaaaactggccccccgcgggcagcctctcggttcgaaatcaggcatatccgggcctgttgatggataattcaagttttgtccttcccacgtgacaattccgttttttacataaatattccagctgcaagaacccgtgcagttgacgccgtgggtggagcgaacgactttgtcgtactgccatctgtttctgtatacattctcccaatcacgatcttcgcttgtcgtttggctatggttatttgaatgatgttcgataggagaaaaatagtttaatctcctgagcaacggactcattttctttttcttcatgatcgttcactccttccgagtcaggtgatgctatgtacactataaacagagacggcgcgtttccttgtgaactatgtcacacactctgcttttttcacaaaacgttcacacagagcagcaggaaggattttcaaacgatatggggacgcccggcgtcatcaaaaaaaaccggttctgtttaagaaccgggttcggcgttttcatcccgtgatgtatgcagataccgcaaaaacaactgataggaacagaagacattttgctgaagcatcgccaaaaagttcatttgcagccgcggatggtaagacatcatttgcttaaatacggaatatggaatatggagtaccaggatatccggtgaggcattgactgagataaaaggcgataaagagagcccgcctttttcatcaatcggaaacacatcgcctttttcccacagcgcaacggtttgcgacccttcagggagcctgctgtccgtaaaacggatattgccttttaatacaatataaacggattgtgaatgaagaaaggatggagattggtcagatgagccgcggataaacgtcccgtttttcagcaaggtttcgacaatggacagaggcacttcattaaacataggaagttgtttcagaaataataaatagtcacactgattcataggaaagcctcctgtgctaaggatagctttagtgtagcccgattgagcccgcgcggcagtgatgtatttcacagcttgtatgataaaagtcacttatcaggagagtgtatgtacttataatgaaataaaaaggagggtttcgatgaaggcgatgattccgaagcagcacggcgcatgggcgatgctgctgattccatttttactcggcatggtcaagggaggcccggttttctggcatgttccgctctttctgggctggctgttcctttacttagcggtttatcccgtttcgctcgctttgaaaaagaaacagcttcagccctatcaaaagtggatatggtattacggttttccggcctgctgctttttgatcatttctgtctatcataagccgcagctcgtctggatcggcgtttttttattgccgctgtttctcatacatacgcattatgcccgccgaaaaaacgaacgggcgctcacgaatgatattgcgggtgttctgttcttttgttcaggcgggcttgcgagctgctggctgggaacgggaatccttgacggctgggcctggtttctattcttgcaatccgctttattttttgtcgggagttctttttatgtgaaatcggtcatacgggagagaaaaaacagaacctttgcatactggtcgtggggatatcacctcttgctccccattttatcggcttttctcggggcaggctgggcatttctcgcttttatcccaagcagtctgcgggcctggttttttcacggaagagactggccggtgaaaacgatcggcattctggaaatcgtaaatgccggcttctttttcgccgtcatgtgtatatgtatcacaagctgaaaaacaaggacaccggctgcccttgttttttttcagtcaatattgcagatctccagcggacaattttcacactcgatctcgcatcgtaaatagtcccgcttgtgcaaaataatttttccggtttcgtctatcgaaataaccccttgtttgcggaggtctcccagcatgcggttgacgctctcccttgccgccgcgcaaaacttagccaaatcctgatttgtcagcacaatgttaatcagaatcccgtcgcttcgttccaccccgtagctgtttgataagcggataagggtggaatagagcgccccctttttgccgtgaagaagcaggtccctgatcttggactggatttttcgaagatgggtgctcatccatttcataaattcaaacgtcaaaacaccgttttggatcaattccttttccagcttgtttttattaatgacgagcacctcgccatcctctaacactttcgcactgagcatatatctcggctcatctgtgaatagcgtcaattccccgacaatatcgtttttttggcagattctaagcgtcaggtcttttccgtcagatgtcagcttgccgatttcaatgagtcctgactgaatcagataaagctcttttgcatccattccttcttgaaacaaataagtgtgttttttcattttccttttcgtactgatcgattccagcaattcatgcagttcgcgggaaagaagttctttatcggattttcggacagagagaatattcatgagctcacctcgaagaaagtcacgttgcgtatgtatattgtaacgtgacttgatttgcactcacccagaaaaaactaacaatcttgtgaatggatcattatgaattgaggctctgactgtttctctccgtatgtgttttcattctttcctgccaatacatccagatcacaagaacaaagctggctaacgcggcctctgaaagcgccataaacccgatcgcgtattggcctgttgcctgaaatacacttgccagaatcagcggagggaaaaaaccgcccagtccgcccatagcagacacaatcccgttggcaattcccgcttgcttcgaaaaatagaaaggcaccagtttaaataccgttccgtttccaatccctgagcagactgccaccgtcagcgatccaaacgcataaaggccgatcgtcggggagaatgacagcatgacccctgacagcgtaagccctgcgaaaacgaacatcagaatacggagcgggctcagtttatctgcaagaaaccctcccacaggcctgagcagcgtagagaccgcaataaagccggccgtccgcagaccggcgtccgcagggctcagcccaaaatgctcaaccaaaaaattcggaagatagatggtaaaggcgacaaaggcgccgaacgtaataaaataaaacaggctcaacatccacagcacatgatttcggtaaacggctttcatttgtgtctttatggaaactttgactttcttctcatgccggtcgccgaacaaaacgtgcagtaatgcgaaaacagccagcaaaacaagatacatctgcacggttgctttccatcccgcggcttgagcgataaccggcgccgcaaaggtagtaacggcggtgccgatgtttccggcaccgtaaatcccattgacgacaccgtgcttttctttcggataatatttcgggagggacgtcactccgatggagaataccgctcccccgatccctaagaaaaagccgcccgcgattaaatcaaataaagaatccgcgatactgatccaaaatacaggaaacaaaagcaggatgaagctgatcataaacatcagccgcgcgccatacctgttcgttaaatatcctaaaggaatacggagaagcgatccgagaataacgggaatcgccgtcaccaatgaaatttcgcctttgcttaaatgaatatctgatgtcatttgagaaatgagcgatgaaatcagcacccacaccataaaccctgccactaagcttaatgactgcaacgataattgaatatgttgacgattgatcattcggcttgcccctttcactgattcaatatcagtcttatcatacaaaaactcagtgtgcgggattgtgaattacatcacacgctttatatacaaaaaaagaacaaagcccgaagactttgtcctttgatcatcattacattttttccggagcggatacgccgatcagctgaagcgcattgttcagcgtaatttgcgtcgccttcattaaagcgagacgcgcgcggctcttctctttattttccggatcgatgactttctccgcattgtagaagctgtgcagagcggaagccagatcataaatatagtttgtgacacggtgaggaatgcgtttttccgccgcttctgccactgcctcagggaagccgccgatcgttttcagcaggtcatattctttttctgattgaatatggctgaaatcaagatctgccgccggtttaagtccctgctcctccccttggcgaagcatgctgcaaatacgtgcatgtgcgtattgtgcataatacacagggttttcgttagatgtggatacggcaagatccaagtcaaaatccatgtgcgtatcagcactgcgcatcgcgaagaaataacgcacggcatccaagccgacttcttcaatcaagtcgcgcatcgttacggctttccccgtacgtttgctcatcttcattttttcgccgtttttgtataaatgaacgagctgaatgatctcaacttccaatgtgcctttcttgtaaccgagcgcttcaattgccgctttcatacgcggaatatacccgtggtgatccgcgccccatacattgatgagcttgtcgaatccgcggtcaagtttgtctttatggtatgcgatatccggcagcaaataagtgtatgagccgtcttttttgatcagcacacggtctttatcgtcgccgaacgttgtggagcggaaccatgtcgcgccgtcctcttcgtatacatggcccttttcgcgaagcgcctcaagcgcctgatcaatttttccgttttcgtacagtgacgtttcagaataccatacgtcaaacggcacgcggaaattttccaggtcggagcgaagtttatcaagctcgtactttaagccgtattcacggaaaaacgcctgacgttcgctctcctcttcatgtacgaaacggtcgccgaaatcttcggcaagctttttcccgatggcgataatatcctcgccgcggtagccgtcttccggcatcggtttctcgagaccgagcgcttcaaaataacggacttcaacggaaagcgccaggttgttaatctggttgcccgcatcattaatatagtactcgcggctcacatcatagcccgctttagaaagaacgctgcacagcgcgtcacctaccgccgcgccgcgcgcatggcctaagtgaagatctcccgtcgggttggctgatacgaattcgacctgaatcttttcgccttgtccgatgtttgtctctccgtaatgttcacccgcttcaagcacggacggaatcagttttgttaagtagctgttgttcatgtaaaagttgataaagccaggtcccgcaatatccatcttttcaatggaagctttgcctttatcaaatgacgccacgatctcctcagcgatttggcgcggcgctttttttgcgattctcgccagctgcatcgccatgtttgtggaataatcaccgtgtgttttttctttcggcgtttctaacagtacgcttggaatctggctttcttccgccaggcccgctttcagaacggccgctttgatttcttccttcagcacgtccttcatttgttccgcaatgttcatgcgtgagttcctccctcatacgtgatcgtcatattatgtaaatgctgctgcccgtctccgacatgcatgtcatatgcgatgctgattcggcctttttcttcaccgagatcagattgaatcgattttgtgcttgtttccagctcaagctcaccaaatgacattttatatttcgcaattgtggaagctcccgttatgaaacgctgattcattttaacagcgcctgacctcatgatcaggacttcgccttcgctcaccttcacaatcgtttttactttgcctaggtcgtgttcttcataataagatagatacactttttgttgttttacatagtaaaatccggtagtacggaattcgatgacttcatcatttccgtcatcctcgatcacagacttcacatggagtgttatcggtgtctcttgcttcattttgacacgtccttttcatcattccactttgacttgaatagtataatcattcagcttgtaaacttcaactgcttctatcttaccatcattgctcattagatttgaagataaacctcataaaaagcagttccttatgagaagagaaaatcatatcactatgtcacccaatccgtaaaaaacatgacagcagcttttcagaaactcacacagtctcatcgaagctgctgcgacttccagcaacatagattgtgcagcagaaatgccaacgatgtcaaagcgctgcgtgacagctataaaaacgtccgccaaacacacgtgattgctgctgtattatgccaagtcatcatattcggctgcgtgttcgaaatcgtcaaagccgtccctttccgctttcacacgccccttgccgtatcaatgggactcgcggtgttctgattttgtatttattgtattttatgcggacgtacttgctgcagcttttccagcatgtcagcctgttcaaaaaagggcatgcgggagcgctgacaggagccggggtttggcggatgctcagtttcgccataagtgaactgctgtttttaatcatcctggctgccatccagcagatcggctcatttatttataaacgatttttttatcgcagctctgcttctctcaactgtgaaataagctacatcgcaatcgctgacggaccagtcccaaccggaatcaccgtcatggctgtataatcactcgtgcggtacacggttacggtattgtcgccgggctgtgctgcataaatgtactgattatcaggtgttacggcgaggtcaaaggcgccgggcagagacacgtttgcaatgatcctctgtccagccgtattaactacgtataagttattaatgagaaacggttcactatatggctctagaaaataagccctagtgctatcgcgagaaaatacaatcgtcctcagcgtttcaaataaacggttgaagtcgcctcccctgcttaatggtgacaaactgatctccgttacacctttcggcagcagctcaccattcaacacatacgcaaaattcccagcgtaaggagtggcaatgaaactgggaaattcaaatgtatctatgatactttctaccaactgcccagtatttacatcatatttatcaaccgaccaactgcttccattagcggtatagacatactgtccattcggatcaagagcaaagtctaaagcgccgggtatcggaatgacatcaatgaccgattgagaggccatgttgatcatatatatagatccggcggccatcacgtacgcgaactcatctgttgaatcaaattcaacctttctcggccctcctccaacagtgatggtatttatgatggttaatgttttattatctagcactgagacaaggttggtattcccatggaggacatacgtgaaagctttatcgaaagtaacgcctagattagttggcacgtgagaaaaagggattgtttttacaacagtgtttaaatctgaatcaataaccgaaaccgtgctgtctcctgaattggctgtaaacacatacgattgagggtctggcggtggcggtaaaacaagcgtcccggtcaccgtaagcggactgccgtagaaaggcggtacaatgagaagatcttccactgttatttgactgaaatcaggacagcggccagactgcgctgcataataaacaacttgatcaatctcttcagtatgaatcacagaaacagacccgtccccttgtccatattgatttcgtacaggcgacacactgacaagaagcgtaacggtcccttttactctcacggcatatcgaacaccgatatcttctggttccggcccagtctggattaagcaaggctcactgatacataataaatgagcagtactccatgtaaccgtcgcagctgcttcggcagaatcaatggtgaacccctcgggaatgtcaatcggcacttgaaacggcgcttctctgctaatttcctcatcacaaaaacagaaacaattttcctgtaaagcagacagatcattctttttcatgaattcacgtccttttagaaatgtacagcatgcagttggttaaatcacaatatctcccggtgaaaccccaagagatatcacagtctccacagaataatcatccgtgttgtaaacagtgatgttctgctctaaaaaatgagcagcatacagaaattcgccattcggagtaaacgcaaagtctcttgccgattgcggaacatttcctataacgcctgcaccattcggactgacagcatataaattgccagtgaagctgtcatgtaaatacacctctgatccactcgtaaacattacatattggccatcaggctccagctcttgggtaatgctgatcgtaaacgtatttaagtcaataaccgtcaaataattgaataagaattcttgttctaagacatacgcataccgctccggccaatttgtttctatggatgatacgataagctctcgttcaatcgttcctgtgacttcaccggtgaataggtccactttttgcactaaaccaaaatcaagaacataggcgaataacccattgggatcaattgcaaaatcaaatccttccacaggaatcgacctatccacagttaacgtatcaattccaatcacataaatcgcagtatcgccgagaacataagcaaactcatgatttgggatgcattttatcgatccaggcggctgatccagcagtatggatgctgtcactgttaaagtgtcataatcgatgacagaaatcacattattgttgaagtgcaaaacaaacacagcgcttttatccggagttatttcaatacctgtcggccggtacggtagagcaatcgttgtcacaacagtatgagtgtttgtatcaatcacagaaactgattgatcatttggattcgctgtaaacgcataaacgggttccggctcaggaacaaacacaatcgtgcccgtcaccgataaaggactgccatagaatggcggaacgacaataaggttctcgatcgtaatgtcactgacatccgggcaatcatcgggttcatcagaataatagacgacttggtcaatctctgcattgcggatgacagaaacagacccgttcccttgtccatattgatttcgcactggtgagacactgacgagaagcgtaacagttccctgcaggcgcactgcgaattgaacaccgatttcatcaggctctggccccgtctcaatgaaacagcgttcaatgacacaagaaaggctgtctgcattccacgtcacgtttgcaacagcttcagccggatcaacaacaaacccctcaggcaattcaatcggcgcttgaaacatcgcttcacggcttgcttcttcctcgcaaaaacataaacattcttcttgtgcggctcctgctttttctttaaaggaaagcttgttatttctcatatcttcacttccttttcagacatacactgctcacgcagatacaacagaatatgggaaggtgtatttgtttgcttgtacaaattgtggggataatagtggatttttgaaatgatatccgcagacatgcggttttaacgaaagaaaacattgcggtatttttgcgctatccttccgaatgaaaatgataaaatatgtcatatacataacgtggaagggagggattgggaatagtggcgagtgttttatcatcttcagcggttggagaaaaaatcaacgaatggtatatgtacattcgaaggttcagcatcccggacgccgagtacttgcggagagaaatcaaagaagaacttgcaggtctggaagatgatcaggatcttcatctatactattctctcatggaattccgccacaatctgatgctcgaatacctcgaaccgctggaatcgcagcggatagaagaacagccgagactatcggatctgctcgcggatattgataaaaagcaggcccggctgaccggacgtcttgattattattttaattttttccgggggatgtatgagctggaatgccgtgaatatctttcagcgattcagttttttaagaaagctgaatataagcttgattttgtcaaagattgtatcgagaaagctgaattttattttaagatgtcagagtcctactattatatgaaacagacatatttttctatggattatgcccggcaggcttatgaaatttatcataagcaggaggcatataatataagggtgcttcagtgccattcattgttcgctaccaactttcttgacttaaagcaatatgatgaagcaattcagcattttaaaaaggcttatgccatggcagaggcagaacagcagccacaattaatgggccggactctatataatatcggactttgttttaacagccaagaaaattacaaaccagccattgattacataaaacgggcaatagctgtttttgaagatgggaacatcatcacttctctcccgcaagcctatttcttaatcacacaaatacattataaaatcggaaatatggccatagccagacaatatcatgacaaaggggtatcttatgcagaggaggcagaagattccctatatatagtcgagtatgaatttttggaatctttgtatgtcggtgagcctgatgaagaagcaatcatggaatgttttgactttctcagagataaatcgatgtatgctgatcttgaagattttgccttagatgtggcaaaatattatcatgaaagagaaaatttcgagaaggcttccgcatattttttaaaggtggaagaaacaagacagcagattcaaggaggtgtgaagttgtatgaaattgaagtataaattagcacttacttgcttggcaataagcactgtttttgtttcagccgacatcgcaagtgcaccgaaacatcaatttgaagttgctcagcgcggaatgatttaaatgatgattacttttaggcttgcaggttaaactgcaagccgttttttatataaacaactaatttgcaaaaacaaaaagtataccttaaaattcaaatgtgtaaaaagtatttgacacatatacatatattatttaaaataaatatatataaatttgaaaatttaaaataaaaacaaaaatatttaaggagggttttagtggataacaatattaaaaaacttagaacagcagctgatatttcacaaaatgatctggctaagctctgcaatgtgaccaggcaaaccatcaatgcaattgaaaataataaatatgacccgactttaagtctggctttttcgatagctcacgcattaaatacgggaatagataaagtattcaactataacgccaaaaaaaagtaagggagcggttcttatgaagaaaatggatgagatgcaaaaacaccaatcgggtatagccgccagaataacatttagtttttatactgtcgctttactgatatggtcattaatagattattttaaaaacggaaatacaggatggcaatttccaatacttttaataggctgcgcgctctatttatggattcaagtttatcataatcgaaaaacaaggtaacaattccaatacacttccggaggattatacagcaatgtacgaatataagttcataaaagtagaagtaaaccgatggaaaggaaagcctaaagaagactataaagaaattattgaaaagtattcgcagcaaggatggaagctggttcaaatatttgctcctcctatttcaggttatggggcagccgattattttgatattattcttgaaaaaaaagtataaatgtttcagtacaaagaaagccggatcatacatatggtccggctttctttgtactgaaataagccagcagataccttaacggatttcacctcttaaatattttttcggaaatccgcaattcaaatagcttccaatatattttattatttaacttgctggggatattgaaaaaattggaggaaaaaatgagtctacttttaaaaacacaaaatagtaaagcgatttttacattagtagcatcaggaatcattgttctcgctcttttcagtataaaacataatcatttaagcatggatgtcatcgatattttaaacagagctggaataatagctcctagttggattgtcagtgctatcactgcaacgggttcagtcctggctatcattactgttttaggatctcttggtgcaggcttgccattagccgttttagaacaattggctgcagcaagtacagcagcagcttaatataaaacattaaattcaatatccctggcagtcccttaaacgaatggatgaaaatactttgtttaaaaagaacgttttagtcaaattgtacatactctgtctgatcttatttttaattgctttatttacagcatatttttatacagatcccgctacaaatgtaaataatctaaatcgaaatatccgtccggatttttttcagattttctttaataatattaaagtagcgagtctgcttgtttttttaggcccgttgacgctgtcacttggcacgattgcagttttaattattaatggattaattttaggaaatgccataggaaacatcaaagacaatttaaaccttttactgcttgttataccccatggaataattgaagtcccggtattgcttcttgcagcttctgtaggaatgaaattaactttggatttattactcctcaaaataaatttaaaattcacttttaaatatattggtattatatttctcggtttaatgatagcagctatgttagaaacatttcttacacctatctttataaaaggagtctcttaggattatgcaaattgaattatcttcatttaaggaccgaaacattaattttttgtcctcgtttttgttttatattatcgggttagctttttatttaagttccctattgccttttatgaaaagtttaattcccaaaaacatccctatacaagttgttgagcaagtaaaacatttagattatatcattgcgatagccgcactgttacttttaatgttcggggtgatttttgaaggatttgtattatttctcattataaattttcttggcgctcaaattaagattaaaaccttttattccctatttatgttttctaacatcccggtcgcaattaagttttttcttatatcattcaaaaacattttcgcggaacatccaaacactagtttatttttcacaagtaatcatttgattttttctatctttgatttgttcaatattgcatacttatttcttttgtttattcttctgaaatggagaacaaatttgaactacctgacaatctcagtttttatttttacggcattcctgtatagaatgtttttttagcatatataaataaaccccctcaataggggtttttctttcatttcgttcactgtatacaattccttttatatgcttccgaaacaataccgactctagtactcacattccactttttacagagaccggctatgatatattcgacattacgctgcgagtagtttaatgacttagcgatctctttattaggtttttcagcaattatcagtttaattactgaaatttcaatcttttttaattccaattcattttctactgctgttttcattctaacttcctttctaaaaatgtatttactaaataataccctattatataatttttatcaataacatcaattattaatggtaaaataatatgttgcttttactaacttctaagtagtttatatacaatataaaaatcccccgcatgtttcaagcgggggattttcttttatttcacaaacccaagcagcatttcacgaatcatcttgcttgccgtgtttgcggtttgttctgagtggtcatagaccggcgcaacttctacgaggtcagcgccttttacattgacttctgagcgcgcgatttcatggatggacgcgagcaattctttagacgtgatgcctcctgcgtcaaccgtgcccgttcccggcgcatgagcgggatcaagaacgtcgatatcgatggtgacataaacagggcgtcccgcaagctgcggcagcacttttttcagcggctcaagcacttcaaacttagaaatgtgcatgccgttttctttcgcccattcaaattcttccttcattccggaacggatgccgaatgaaaatacgttttgcggcccgatgagctcggccgctttgcggatcggagtagagtgggaaagcggttcgccttcataatccgtgcgcaggtcggtgtgcgcgtcaaaatgaatgatggcaaggtccggaaatttcttatacatggcttttatgacaggccatgatacaaggtgctcccctcccatgccgagcgggaactttcctttttctaaaatgctgtccacgtattcttcaatcatatcaaggcttctttgcggattgccgaacggaagcggaatgtcgccggcgtcaaagaaattcaaatcagccaagtcacggtcgagatacgggctgtattcttcaagaccgatagacacctcgcggattctccccgggccgaaacgcgaacccggacggtagctgaccgtccaatccatcggcatgccgtaaaggatggcgtccgcctctttccagtcggggcggcttgcgataaatacttttcctgaatatgcttcatcaaacctcatgataaaaccctcgctttcctgtaaaaaagcgcaagattcgctcctgcgccgtacgtttttatttgattaagtcgctcacaaatttcggaagaacaaatgccgctttgtgaagctctttcgtgtaatatttcgtgtcgatgtcaaagaaacggctgtcctccacttcaagcggatcgtactttttagaaccgatcgtaaatgtccacaggccgctcgggtacgtcgggatattagccgtatacaggcgggtgatcgggaagatttctttcacgtcacgctgaacgtttgtaatcagttccggtgtaaaccacgggttgtccgtctgcgcgacgaagatgccgtcttcttttaacgccttggaaattccggcatagaagccttttgagaacagattgacggccggtccgaccggttctgttgaatcaaccatgatgacatcatactcattctctgatttcgcaatgtgcatgaaaccgtcatcgactctcacgtcgacgcgcggatcatcaagcttgcccgcaatggacggaaggaattttttagagtattcaataaccttgccgtcaatgtcgacaagcgtcgctttttttacgcttgggtgcttcagaatctctctgatgacaccgccgtctccgccgccgacaacgaggacgttttccggattcgggtgcgtaaataacgggacgtgcgcaaccatttcatgatagacaaattcgtctttttcagaagtcatgaccattccgtctaagaacagcatgttgccgaattcttctgtctccaccatttccagatgctgaaattccgtctgttccgtatgtaatgtttgtttcacctttaatgtaatgccgaaattcttcgtctgcttctccgtataccaaagctcgctcaattgtcatctccctttcaaggcttatttcatttattgtaagcgtctgtatcgcttttattccggttaaaatctcattttcacctaaggaaaaagtatagaggatggaggggaaaaagtaaagaagtgtccggtttgatatgtttaaaaaacccccttttttcacataataatagaatcatgaaaaagggggttcccaaaagtggataaagtatctggaaaacagctcagaatcacgttcaaaatcatccgcgcctgcatctttctgacactgatcggcggaatgctggccggcgtctgcttcacatccgttcttcttgcagcgaaatggcagggggccccctccgtccgggttcctcagtctacgattctttatgcaaatgacggctcaaagctaggtgagaccgatttcggggaaaagcgctactgggtgcggttaaaagatatcaatccgatagcggtgcaggccgccatagcggtggaggatcaaaacttttacaatcaccacggttttgattaccggcggatggccgccgccgcgctggctgacataaaggcaatggccaaggttcagggcgcaagcaccatcacccagcaatacgcgagaaatctctaccttgagcatgataagacatggaaacgaaaatggaatgaagcattttacacgatccgccttgaacagaactattctaaaaacgagattttagaaggttatgtaaatacgatatattacggccacggcgcatatggaattgaagccgcctcgcgcctgtatttcggcaaacacgccaaagatctgaacgatgcggaagccgtgcttttggcgggcataccgaaaggcccgtccggctattcgccatatgtcagcgaaaagaaggccaaacagcgccaggaaaccattctccgactgatgatcggccaaaaaatgatctcaaaagaaaaggcggaaaggcttaagaaaacgccgcttgcctatcagccgctgaaaaacagaaccgcggcgaaaacggcgccttatttttacgatgatgcgatgaaagaactcgagaaaaagctcggcatgacgcgcgaacagctggcaacgagcggattgcgtgtttatacgacgcttgataagcgcatgcagcggattgcggaaaacactgtggcacatacgatccgtaccggctctgacattcaggtcggcttttccgcgattgatccggcaacagggcgcgtgcttgcgcttctcggcggacgtgactacgaaaaaagcccgtttgaccgggcgacacaggcgaaacggcagccggcttccacgatcaagccgcttttgtactacaaagcgattcaaagcggctttacaccggtcacgctgatgaaaagcgaagccacagagttccagattgacgacaacggagatacttattctccaagcaattacaacggctactacgccaataaaccgattacgctgcttcaggcgcttgcgttatcagacaacatttatgccgtgaagacccatctctttctcggcatgaataagctcgtgtcggcggcaaaggaattcggcatcagcgaacatttaaagccccttccgtctctggcgctcggaactgaacccgtgcgcccgattgagatggttaatgcctacgcgatgctcgcaaacgggggaaaacaaatcaccccttcctttatcacaaaagtgacggataccgccggcaacgtcttgtatgaacagccgcgcggacatcagcagacgcttgataaaaaagccgcttttgtgacggcgagcatgatgacgggcatgtttgatcaggatttaaacggctatacttccgtcacgggacgcaccatttctgaccggctgacacgaacctatggcggtaaatcaggcacgacgagcgcagacagctggatgatcggctttaacccggctcttgccgccggtgtatggacaggctatgacaaaagcagcacgattgattcagtagaggaaaaaagctatgcgaagacgatttgggcggactttatggagaaggcgctcgaaggagaaccggaaatagcgcttaaaccgccgaagggcgtcacgggcgtctatatcgatcccgcttccggctacacttcgggacccggctgcgccgcaaagcattatacgtatttcatcgcaggcactgagcccgcggatgtgtgctacggaccggaaccttctaaaaaagaaaaggaacacgcccccgcccgcaaagaagctccgcgcaaaaaatggtgggataagtggctcggcaaaaaagactgagcccggtgcattgcgcgccgggctttaatccgcgtcttcctcaagcacccacgggagcaagagtgaaaagtcgagatggataatagggtcaggaaaacccttcggtataaaaaatgttgtactcggcaatgaaaacgaaaagcggatatctcccgccctctcgatatgaaaattcggccagccttccctaagcctgccgacaatcggatagctgcccgcataatgatgcaggccgttttcctttccatgctcccccaaatcgtgacagacagccggacgaatcccaaactgcgtaaacaatcttgttttctcggcgggaaggagattcaccgcctcggaaaagttccggcagctcccgcaatcgcaaggatcaggccatgatttttcgtattgttttctcgtttcctccgcatctgcttcaatgacccatggcccgatttcaaagacggtgaacatgatgaaacctccgcgtaaacatgaaaaaccccgagtcttggttcggctcgggactttccatgtcctgattctgtatcaacagtttactcagtacaattgcaaaatagtgcaaatatttataaagttcacaaaaagttcacaaattatttttcttttggaagcagtcctgttttcaattcatcggatgaacgttcccagagcccttggtcatgcttctgcagaaattcagcaagcacctgctttgagctggcgtccattttgtccacgataatgcagcgcttcattgatttatccattaaattcacatgctccggcaatgacttatagcctctgcggatacttctgtccacggtcatttcacaagccgtcacacccgcgtaataagggccttcttcttttctgtcgatggtgacccacacgagccagtacggttttccgttcggcacttcatctttgttcggcaggaatttgatgcctttttcaacgacactgcgggcatgcatggcgccgatgtcaacgaaggcttccttctcttccacatcgacaaataccggagaaatattgtcaaggctcagcgccccggcgccaaaaccgccatgtccgtcggtcggatcacttttaataatattaaatccgattgttttcttctttttttcttccatgaaaataccctcctacaaaagcggttgaaatataatggcaaataccttgagaatccagtctctcccctcgcttaacagcggccacacgacataggagccgaccggtgtcacaaacagcacgagaaacacgataatcccgtagctctcaaactgagtcattttggcgcgcacccgcggcggcacgagatcctcaataatccggtagccgtcaagcggaggaagcggcagcaggttgaataaacacagcgcgagattcagctgaatccaaatagagaaaaagcggtcaagccccatgctgaatgcagaaagcagctccattccgtaagcatgcatcaacactagcaaaaagaaaccgataaaggcaagaagcaggttgcttacaggcccggcgacggaaaccagcactcccgccagccgcggtcttttaaaggcgcggcggttcaccggcaccggacgggcccagccgaaacccgcgaccaaaattagaatcgttccgaaaacatcaagatgtttaatcggattgagcgttaatctgccctgcctcgccgcggtatcgtctccgaaccgatacgcgacatacgcgtgcgccagttcatgcatcgtaaatgccacaatcagcgtaatcacgacatagggcataagctccagcggataatataaaaatctgtccaaatgtaaaaatccccttttttaaaaaatgcaagattgtccttcattcagtatactataagtgacctctcttccaaagagaggaaacgataaaggaggatcagcaccatgccgctcgtaaccgttaaaatgcttgaaggccgcacagatgaacaaaaacggaatctggttgaaaaagtgacagaagccgtaaaagaaacgacaggcgcagccgaagaaaagatcattgtcatgattgaagaaatgagaaaggatcattacgccgtcgccggcaaacggatcagcgatacggagtaatccttgataatggccggcgctgctatgtcaggccggcttatttcattactttttcaacgaggctgaaaaaggtattcttttcttcttctgtcaatgcttcgaacagctcgtcaatgagcatctgacggttttcaatcatttgcatggccgccatttttcccgattcggaaagcgtcatccataccgtgcgccggtcttcgttatttctcgacctttccacgaaaccctctttttctaaatgattcagagcggttgtcgtggctgaaggcgataatgtgacttcctgcaatatatctttaatcgtgcacgtgccgtgccggtaaataatcctgagaataaatcctctgatattgtttatactcttcggaattgtcgcctcatcaagctttttcgtgctctttaaatatttcgtgagcgcgtaatccagtacatttgcttgtaatatatcgtgcttcatgcagaaactccccatttcaagatgcatccatcatcattgtttgttttttattacattttactgataccttacggagaaagtcaaaattccggccggaaagcccacaacttttatcctgccctatacagactattatctcctgcttttttacccatcccttttatgcaatgctggttttatagacatgattcaggtaaaatcattaagggtgactgcgtttgacggaaaggataatctgatcggatgcggcagacaatatgactggaaaagaaacggaacagacggggaaacagaacacaggattgtcgattacacagaagatgtgacacgggtaaaagccaaagaggccctcttggcttttacttttggatggagggatgcgtgttgcggaatatcctacaaaaaaaagacatcacccagctgcttgaacaaagcagaaacaggcagactgccaaaacgatgggtggatttgatttaacattactgggcatcggcgccgtcatcgggacgggcgtcatggttcttacaggcattacggccgcgaaaaacgccgggccttccgtaatcttttcttttatcattgcagccgttgtctgcagccttgcagcattatgttacgccgaaatcgcttctgttctcccggtttacggaagtgcctatatttactcttacactaccatgggagaaattgtcggccatttaatgggctggacgctcttatccgtttatatggtgacggcgtcggcggtggcaagcggctggtcaagttattttaataatctgttagccgaaatcggcatgcctttgccggacagtctgctgcacgtgccgagccaggggggcatcgtcaaccttcctgccatcatcattactctattaattgccgtcgttctgtcacgcggctctaaagagagcaaaacctttaataatataatggttctcgtaaaaatcggaattgttttgctgtttatcatcacaggaagcttttttgtaaagccgggcaattggcatccttttatgccttttggaatcaaaggcgtcattacgggggcttctgccgtcttttttgcgtttctcggatttgacgcgatttccgcttcggctgaagaagtcaaaaaaccgcagcgcaacctgccgatcggtattatcggttcattggtgatctgtacatttgtatacgtcatcgtctgtctcgtcatgacgggtatggttccgtattcacagcttaatgtgccggaagccatgtcttatgtgttgcagtctgtcggacaaaacgcggtggcgggcgttatcgctgccggtgcggtgatcggactgatggccgtcgttctcgcccatacctatgcggcgacccgtatatcttttgcgatggcaagagacggaatgctgccgaaagtctttactattgtcggaaagaaatcgggagcgccgatctttaatacgtggctgatcggactgatcagcgcctgcatcgcgggttttgttgatctgaaagagctgtcagatctctcaaacatcggcgcattattgacattcgccatggtcagtctgtccgtgctgattctgcgccgcacccataaggatctgccacggggatttaaagtgccttttgtacccgtactgccgattttggccattatctgctgtttgtttttaatggtcaatctgccgctgaaaacgtggctttattttgccgtctggctgatcatcggcgtgatcgtttactttttatattcgtacaagcacagcaaattgagacaataaacaaaaccaggcccgctttatcgcggcctggttttttcatcaaaaaagacgaaagccatcgcctttaacaaatgtgtttcagctcttctatgtagtgaagcgcctcatcatattcttcatccgtatatttctgtttgctttttatcgtaaacactttctctttcttttcctcagcttcaaggccgtcaaaatacaaaatcgtagacaccagctccaaaaaccgggatgagcggctgttgacgctgtcgatgtacttcttcatatccggcatcgtaagctccgcatgatgtaaaaactcggctcccgtctccgtcagcgagtaccggtattgaaagtagccgccctttttttccttcacctcatccagaaacccaagattgcacagctcttcaattcgaagcgtcagttcttcggaatacgggccgtaaaaatgaaaatcatatttttcgtagaaaggatactgcattttcttcgcgatataaatgattttctgcagctttttccgcccgatgatttctccagaatccgagaacaccttcatcagttttgcatgttctttcaacaaattcccgacatctccttttccttctttaccaaaatccttctatgtcagtcccagcagctgccggatttttaattttgcttcagggttttctgaatcgtcacaaatgaggtccatcggatagtagagcttatggtccgtccggcgtttgcccgaaatggattcgacaatggcggactgcctggacagctctttgatctggccgttctgcgttaacaggtgaatcggcagacgctcctcctcttcacccggccggtaaaaatcatacggcagatccgatgaagaatcgaccactaaatagtaattgggatcaattcccgcctctttaaacagagcggtcagttcaaaataagccgacatttcctcattggggttaaattcggcatattgaaacagctggcggttaatgaagcggcggcacaagtcggacagaatcgggtcctcttcttcttcccaagcctggaaataatataaaatgatggcttcatcaagcttcagataatccgcaagcgtcagcttcccttcaaaaatggaataaaaatgaacgggagcatgagtgaagatatacccttcttcatggagctgcttcgcacggtggagaattttcgtcaaaatgacttcagcgcttctcgtcacgggatgaaaatacacctgccagtacatttgatagcggctcataatatagtcttcgacggcgtgcatgccgctttgcttaatgacgatttggtcctctcgcggacgcatcacccttaaaatccgttccatatcaaaatgtccgtagctgacgcccgtatagtatgcgtcccgctgaaggtaatccatcctgtcggcgtcaatctggctcgaaatcaggctgaccacctgtttgtttttgtatgttttggcaatgacttcggcaacatcctgcggaaatcccggtcccgcctttctgagaacctgattcacctcggtgtcgccgagaatgatttccctcgtatagtcttcatgatccagatgaaaaaccttttcaaaggaatgcgaaaacggcccatgtcccaaatcgtgcaaaagcgcggcgctgagacagagttcgcgttcattgtcatcccattcaggacgccctttaaaaacatcatcaaccattcgtctgacaatctcatagacgccgagagaatggttaaaacggctgtgttccgcgccgtgaaacgtcaaatacgtcgtaccgagctgtttgatccggcgcagccgctgaaattcacgggtgccgatcaaatcccagatcagcttgtcccgcacatgaacatagcggtgaacgggatctttaaacactttttcttctgataattttccgtttggatacgccatcgtcattccctcttttttttagccgtgattctattatatcggctctgtaatttgaaaacatccttgaatttgtccggcgttttgttccagtattccgtcattgattttttgaagcaaaaaagcctgacccgtcgggcgaggctgtcgtaaaatacacatttactttttgatcttctttttcactttctcaatcagctcatcctcagtcggcgccgacagcgggcggttgtttacgaaagcaaacgattttttgcgtccgggcccgcaatatgactgacatccgacctccacttttgcatccgggtcagcttctttcaaacgcggcagcaaagtcttaatattggtggcctggcaatcatcacacactcggaattcattagccatgatgtacgcttcccttcattcaatgttcctctatgttaaatcttaattttaaaaacgaaaaaaatcacatcacatctcattgtacaaggattcatcttatcctgcaaggctctgcgtatctctcattctttcagccaatttgtataaatattttccaatctggacattctaataccatcaaagatattgggggttgagaacattgacaaaacaaagacaggacgcctggtcggaggaaaacgacctgctgcttgcggaaaccgtgctccggcacgtccgggaaggaagcacgcagctgaacgcctttgaagaggtaggcgataaattaaacagaacgtcggcagcgtgcggtttcagatggaatgccgtcgtgcgccatcaatacgaaaaagcgcttcagcttgccaaaaaacagcggaaacagcggatgcgcgcgctcggaaacggccagccggccaagaagaaactattatatcagccgcctgcgccggatgcggacatcatgcaggaaaccgcagccgaagagacggttcaaacggaagcgccaaaagaggatcggcaagccgtcatgtccggcgaacatatgccttatgtcgatgaaagcttcaaggaagagttagctagtttatcacatttgctggcgcctcagcagccgagccaaaaggcggagctcacaatggcagacgtcattcaatttctgcagagctatgaaggcagcggaaagcaaacttccgccctgcaaatggaaaatgaccgtttaaaacgggaaaaccaagaacttcagtctaaaaccgagcagctggaagcggccgtcgaaaagcttgaaaaagatcaaaaaaccattcaggaagactacgaaaccttggtgaaaattatgaacagagccagaaaactagttttatttgaagacgacgaacatgcctctccgtccttcaaaatggaccggaacggcaatttagaaaaaatggccgaataactcaaaaaacccctttccttgtcatggaaaaaggggtttttgccatttgtcaatgacgcgcatcctgatctatattaatgtaaacattgttcaggaggccttcttcccgcaagggctgcacatctcggtccccgcccgcacataagcataaagattcaattcctcatcccaaatggttcttgggaattattgatcgattagctactgtgcaatacactgtatagagaatacaattattagatatgatgggaatgatagtaaatgagtagccaattacgaaaaggagcgttggaactttgtgtgttgtccctgcttctttatgaagatttatatggttatgaattaatcaagatcataagtgaaacgttccctgtatcggagggcaccatctaccccatattacgaagactcacaaaaaataactacctaaaaacgtatacagcagcttccgatcaaggcccatcacgcaaatattacaaagtaacagaagaaggcgccttatatcatcacacattaaaatcggaatggcttgacctgtccgaaaaagtgaacagcatcattaaggagggaaaatgaatgtgtaaagaccaatatttaaaacatctccggcgggaaataaaagatctgccggaacttgagcaaaaagagatactcgccgatatcggcgaaatattccaaatgggcggcgctgaaggaaaaagcgatgaacaaatcgccggcaatttaggaaaccccaaaacacttgcgcgcgccttaaaagcggatattttcatcagtgatgccgaggagcagaaaacatggcgctcctttttcaaagcattcggcctgatgctggggatgggcatgttcaacttcatgtttatgctgacaccgtttctttttgcctctgttgcggtgttaagtttgatggcgatcggtctgatgctgatgaccggatcattctttctcctcgtaaaagtgccgattataacagccatttttaacggatgtatggttcttggagcgggtatggcggtgtttatggccggatttgatctttcgaaactgatattccgcatctttttgcgctatttcaaatggaatgtcagcgttgtaaggagggaaaccattgaatcgaaaaatgtggtatagcattgctctcattttaatcgctgccggcctgatcggaagcatgttcttcggttttgacggcttttaccctaaatcataaggaaggtgtgcaaatatcatgactgaaccagccctgatattaaaagatgtctctaaaacaatcaatcatacccctattgtacagtcaatttctttcgatgtgagaaaaggcgagatcttcggccttttagggccgaacggctcagggaaaaccactattttcagaatgatcgtacagcttattaaaaaaacagaaggagccatttcattcagaggcagaccggacagcgactttgaatattttatgagacatatcggggttatcattgaaggcccggatatgtatccgaatatgaccgctttgcaaaacctaaaatattttactaaactgcgcagcacctcgctgcgaacggatgaccttatgaatacccttgcaaaagtcgggctagagcaggctgcccgcaaaaaagtgaaacatttctcattaggtatgaaacagcgcttggggctcgcttattctcttcttcacaatcccggattattaattctggatgaaccgatgaacggcctcgatcctaaaggaatgaaagaattgcgcaccattctttccgatttatcgaagcaaggggtttctattttattatcgagccatttattgtcggaaatggaggagatttgcgatagggttgcctatattaaaaagggacggattttaggaattgaagacatgaagaacagacatgaccttggtcagaaaaaactgtttaccgtcacggtcgatcatccggcaagggcgaaagaaatattagagcaggacggtattcttcaagtacagcaaaaagacagccgcatcattgaattggaagcggaagaagataccatcccgtatgtcattaaatctttggcagagaaagagattctgatttcccgcgtttctgcaagaactttgtcattggaagagaaatacatgatgattacagatcaggaggacgcggtatgagcatatttcatctggcgcagaacgaattcataaaaataacccgaaaaaaaggcacacttttatctctttttttcctgtttctcatcgttttgctggccggccttattatgaatcatgagttagatgcttcctcggataacaattggaaagaacggcttctcgccgaaaaaaaacaggaagaaattgataaaccggctgaaacgacaggcgtttattattctgctgatgttaagaataaagactattatttggagcataacatcaacccctatgaatggaacggctggaggtttttcggcacggttacttcaaacgggcttgagattttcgtcagcttgaccgcgattttaaccgtcagcggggttgtttctaaagagtttgcccttgggacgattaagtttatcgctacaagcccgaaccgaagatggcggattttaacatcgaaatttctggcgtctcttctgtttaccggcatggtttacttattttactgtgtgagctgtttgctgatcggcggcgtgttattcggtttttccaatgcttcatatccgctcgtctatactcatttaaatgacagtctgtataccatcagttcaatcaaagcatccggaatcattctgcttttgcgtttcatatcaattataagcattgtcaccattgcgttcactttgtcagtattgtgcaaaagccaggcgctctccctttgcttatcgattttactgctgtttgccggcagtatattgggcggaactgatttgcttgcccaatttacgtggtataaatttacgctctttccgcatttaaatctcgttgcttatgtaaataaaagcgcgggtgatgcgatttcaacgttaaacatcccctattccatgacggttatagcgatctactttcttatttgtttattgatttctttttctgtctttcaaaagagagacattacagcatagacagagaggcggcggcataatgagcggacggcaggaaatactgccagtccagtaatttgccgctggccgccccttggtccatcgctaacggattcaaataaccgaagctcccgctgcttcgctgctgaaagcgtagaaattcccgcccttcccgtataaaaagcgcctcatcgaattggagaaattccataatggctgtgtattttgcaacggcgtcaatgtgatactttctgcactcggctaacattaaacctgaaaaagcaaagtctgatgttttgtaccattccgtgagaaaaggctgcaattcattcatttgcaaataagtgacggcataaagggcatccgcctgttcttgctggatgccgcccggcgccatgagcaaatcggcctcacgtttcatcccggtttctaagaacacgatcagttcttccggagtcaccgccccaaaataagcccctaacaccatgaggatcatagaggagggctctgatttcagttcctcttgtaaaccgcgggccatttgttcaagtccgttatgaaaaaagatgctttttgcggcatctatcctgcggtacacatgatacgcatacgcgaacaggactggatggcattcgtgtgttttttctccgaaataacggtctaggaatagaataacttcttctgtatcctttctgctttcaaaatgatgacatgccgctaaaccgcaaaacaggtgcatgagatcatctgcttccatttcttccggctgcagctgaatgttcttccaaaaacccagcagccattcttctgttttttttatattaaaatgttccttgactatctgcatgttccacactccagattcagaatctcaatcgccggcagaagagccggagcacaatgaatggatggattctcgttatttatttgatgaagagccgcttgacagccataaaaaaatggatcgatacacgattggataaataacatattgcacagctgtttcatttttcggctgccgagacaaaacacaagccatttttgaatggacactttcaagccgggatgaagcagatgctctccctcattcaaatgaagaagacagtactcgacaaactccagctcgttttcagctgttcttttccatgcgtcatggagcaaaggctgaaacatcgaattcttgtaaaagcgcactttttcatggtcagttgacattcccagctcgctcagcaaaccgacaaattcggcgtatttaaaataaggccattctttttttataagatagccgttttgcaatccgtgacgtatgacctgatcatccgaatccattccctgcttctttttataagcttttgccgttaaatagatatgaatcaactcattgacaatggccgtgttacagtgaaacagatcttcccagcatgacttatcaacgaaagcggaggcaatcctttcagtatgttcttttacagcggaagaatggctcgtcttcctgtagtacttgcagaagccggcaaacagctgaatgctcttttgatccggaagcgattgttcagcaaaagataataaaaattgatctgtctcttcagctaatctattcaagttaatcgttcctttctgccctaagacaggcatgcgcggcgccagcggcgacaagtgttgtatgatagcaatgtttgaacacatcttctcttcgctgttcacctttcaaaccgggtttatgttgataggtgatgctcgggacattcccctctttcattcggccctgatagattttattccaggctgcttcataaagcggtttatggttgtccttatccatgttgatatgtaaaaaagagctgcacatcaataattcactggtaatatctaaattctcaagacagatatagatcccgagaaatttcaggaccttttcttttaacgacggcagatgatactctttatccgtaagcgaagaacatcccatgtctgttatataaaaaatcgtatgagtgatgctgtacgcatcatgatccgtcatatatgtatttgggatatcctgaccagctgctgtgtagtgatataagtcagaaaaatccgttatttccgaggttacgcctgctctttgcagactgtacttcagatccattttccgaaagggaactttagcaaggctgcaatcaaaacgcgctgccgtgaatttttccagctcccatatcaccgaagcccgtgacggatgatcagtcaaggtaagaaattcacccgcaatagccaatccagcgagaccgtccggatcaaaatgaataaattcttcaagctgatcattacggagcctttctgtaataaactccgttaaaacagcaacttccttatcatctgcctgatttctgatcaggtaattggtaagaaaaatgagttctataaatgttttaaggcgccacctgaaatcatttgctactttatgattcatatcgaaataatggatatttttaacaatccatgacagtgctccccgcttaatttctgttatatactcttgtgtcaaactctcaccgcctcgtctcagatgtgtaggctccaaacagtgattatcctacttttgagcggctaaatcagagaaattcaaattcgggttttgattgtcttcttggctcggcactacaagcacccagccgctccaagcgaaagaattgcctgattgttccgcatctccggctaacaaatgtgtcgggatcgtgattcttttttcttcttttatttttttaaagttcatatctccatctcctttagtttatagaattatttggaacctacataaatatattaatcaaataaggtatataatgtaaactagttttgatataacgattcttattcactataactaaatagtatataattaccaaaaacaaaaaaacccggacttagtccaagctttcctgcgtgccgaacaccttctcattccgttccagcattcgggtcagatttttttcaaataccatttcctcttccggcgataatccggctgcatacaggcgtccgctgagttccttcagttcagtcaaaagcgccagcattaagtcttgcacggtaatgtccgtttgcagcaattcgcttaatgaagccatcgtttcgggccggatatcgggatatacgccttttgtatcgttgcttttgtcttttaaagcggcttgatagaaacgtctgatcagatcggcgcgttcgcttccgcttttatcggcgcagaggtaaatctgaaccgcggttccgccccgcaggcgtctttgtgagattcccgcgaattttcggccgccgatgctgagatcatagctgcccgggcagtacgatcctttaatttcatatgcttcaatttcggcatggtgcggacgcagcatccgccgcaccagctctgtcatcgcctcgtagcctctgtcgatgtcgatgccttttttctcgtcttcaaaaataagcgagatattcaatacgccttcgtccagtacgacggcgaggcctccggaattgcggacaatgacacggtagccttcgtcctccagcaatttcacgccgtcctctaaaaacggcaggcgcgtgtcctgaatgccgagcacgatcgtccggtggtgcacccaagagcgtgccgtcgcaggcgattcccctttgcctacggaggcgcacagcgtatcatccattgcgaatgactgcttcgcatcaaaataagggccgaggctggattggtcaatgattctccagctcggctgcatcagtaaatcaatcggttgctttcccatctattttaaatccctttcgtcataggctttccatgcatttattatatcactccgcttgtgatgattgaaattggctgttcaatagagcgatgaagatttctttgttttttgtgttctccataatggaagattggatgatagacagtttccgttttaaggagaatccttttatctcaagcacggaaatgctgccgtgaagcagatccttttgcagcacgctttttgacagaacggaaagacccattccgctgatcacggcttctttgacgccctggttgctgctgatcgtcatcatggatttcggccgcagtccgtttgattgaagaacgtggtctaaatattccctcgttcccgaacccttctccctcgtcacccatgcttgattttgcaattcggcagccgggatgttttttctgccggcgagcgggtgtccgttcggtgcggcaatgcacaattcatcctccataaacggctgaatgtccagctcgtttttccccgtatgcccttcaattaatccgatatcggcttgaagcatccgaaccgcttcgctgacctcctccgtgtttccgatcatgacgtccaggttcagctcgggatactcgtcatgaagctttgcgagaagcggcggcagaatatattcgccgatggtaaagctcgcggcgattttgagcttccctttgacataatgatgatgggcgtaaatttcggatttcgcctgttcgtacaaaaagaccatctgcttggcgcgctgatagagaatgtcccccgtcggtgtagtcgtaaagtgcttcggagagcggttcagcaaggcggtttgaaattctttctccaggtttttaatgtgaaggctgacgcttggctgagaaatcatcagcttctgcgccgcctttgtaaagtttttttcttccacgacggcaatgaatgttttcagttccccataatacaaaaagcatcgcccctaatcattatttttcctaatcatttagatcatataaatatattttactaatgattaagaccgcagtaaagtggagttatcaagataatgggaagtgactgagatgaagatggtaaaaggtgtttcagttaccgcaggaattgcgtttgcggctttctatgtcagccgcctgccgttttttcatatgttcggaatgcttgtccttgcaatgctgatcggcatgctctggcgcgccgtattcggacagcgggcggcattagagccggggatcgcgttctcaggcaaatacttgctgaaagcaggcatcatcctgcttggcatgagactgaatctggcggatatctatcatgcgggctggcacgtatttgcaattgccgtctgctgtatgatgtttgcgggtgccgttgtatacggactgtcccggctgttccgtatagatcagacactcagcacgctgacagcctgcggcacagcgatctgcggagcggctgccattgccgcgatcgcgccgcagatcagatcaaatgaaaatgcagccgccatcagcgcggccgccgtttcgttattaggaaccgtttttactgttgtatattctcttgcttatcatggattgagcttttctcctgcggcttacggagccttttgcggggcaacgcttcacgaggtggcgcatgcggcggcggccggcagcgccggaggaaaagcagccgtcgagatggcggtgatcgtcaaactgacccgggtcgcgctgctcgtcccggccgcattcatgctcggattgcgggcgcgccgcagcggaaagtcaaagacggcttctgccgcttcgctccccatcccctggtttatcttcggatttctcggaatgagcgccatccatacatcaggcgttatttcagcctcgttttccgcgtttcttgttcaagtgtcttatgttttcatcggcatggcgatggcgggtctcggtttgaaagtccatatatcggcgtttcgtcataacggctggcgggcgctcgcagcaggcttgatcggttctctctgtttgtccctgttcggctgggccgcagtgacgttttttctataaaaaaagccggccctcataaaggccggcttttgcggattacagcgcttgagcagccgtaattaacgcaagattgtagacgtcttccgcattacatcctctggaaagatcgtttacaggcatatttaatccttgcagaatcggtccgaccgcttcaaagccgcctaagcgctgagcgattttgtagccgatgtttcctgcttcaaggcttgggaatacaaatacattcgcgtctcctttaatgtcggagtccggcgcttttttctccgcgacagacggcacaaatgcagcgtcgaattggaattcgccgtcaagcgtaagctcaggcgctttttccttcgcaattttcaccgcttcagccactttgtccgtctcgtctgatttcgccgatccttttgtagagaagctgagcatggcaacgcgcgggtcaatgtcaaacatttgagccgtattggcgctttcaatggcgatttcggcaaggtcctgactgtcaggagcaatgttgatcgcgcaatcagcgaacacatactgctcgtcaccgcgggccatgatgaagacgcctgatgtttttttcacgccttcttttgttttgatgatttgcagtgcagggcgcaccgtatcagcagtagaatgtgcagctccgctgacaagtccgtctgcgagacctttgtacacaagcatcgtgccgaaatagttttcgtccagcaaagctttgcgggcctgttcttccgtcgctttgcctttgcggcgttctacgaaagcctgaacgagttcttccatgccttcatatgtatgcgggtcaaaaatgtccacgccgtcaagcgtaagatttaattctttcgcttttgcttgaatgtcttctttattgccgactacgatcggctttaataccttgttgcccgccaagttgttgaccgcaaccaggatacgttcgtccaacccttcaggaaatacgattttcacatcttttcctgcgactttttcttgtacttttgtaaataaatctgccacgatataccctcctctatgttgacaaaaaacgcttacttttacagcatactcttcttccagctaaattcaaataaccaacttctattatagcgctttcaaaaagaaatcttatttttctaactaatttaattgaccgtttgttcacggcatagtttctgacacaaggcttcggattattcaaggtttctccacagccgaaacggttaaactgtgatatagtgaaggcatcaatgtaatgaaaagatataggagtgaagatacatgagtgagcagcaaaaaacgaacgaagccgcccaaacgcttgacggctggtacgcgcttcacgatttccgcacaatggactggacgtcatggaagatgttatccagcgatgagcgcctgtcgattattcacgaatttacgggactgcttgaaaaatggggcgtcgcccaaaaagaaggcaaaggctctcaaaccatctacagcatcgtcggacagaaagctgattttatgctgatgattcttcgcccgacaatggaagagctgaacgaaatcgagcttgaatttaacaaatcaaagcttgctgaatttacaatcccggcttattcttacgtgtccgtggttgagctgagcaactacctcgcaagcggagaaggcgatccttatgaaaatccgcatgtccgcgcccgcctgtatcctgagctgccggaagcgaaatacgtctgcttctatccgatggataaaagaagaagcggcaatgacaactggtacatgctttctatggatgaacgcagaaacctgatgagaagccacggcttgatcggacgaagctatgccggcaaagtcaaacagattatcacgggatctgtcggttttgacgattacgaatggggcgtcacgctcttcagcgatgatgtgcttcagttcaaaaaacttgtttacgaaatgcgctttgatgaagtcagcgcgcgctacggcgaattcggttcattttttgtcggaaaccgcttgtctctcgacacgcttccgaagtttttgcacgtgtaataagttgttaaagcctgattttaaaaatcaggcttttttcaaaaaactattgacaaaatattgaacctaatgtaaagtttactttacgtaaagcgcactttacttactgagcaattgttgtatcgaaatgaggtgaaatatgagtgaaaaatcggttaaaagaaattagacagaggcattcttattcacaggaaacgttagccttgaaattaaaagtgtccagacaaaccatcatttcaattgagaatgggaaatataatccctccctgcccttagctttgaaaatagcaaagattttcaaggaaagtgtagagaatatatttttgttagaggaggaatagaaatgaagaagaacttttttttaatatcttttgtttttttcattatcgtctcgggagcttttatagcactatcaatatttacgcaaacaaaattaccttcaataacttttcccatcttaactctttcaataataagctttgttctatgggctaccttcccatcattaccattaaaaagagatgaacgaggaaagtttataatacagaagagcttagcctatacttttatgctaaccttaatttatcttttcattttcttgacaatattttattttaatttaatcaacctagacaaagaacagattttactcttattttcctcgttagttataagtacagcatttatatcgatcctcattctaaataagaaatactaacaattaatactgaaagttagttaaattaattcttttttgaaagcttttactattattccaactcgagaacgtacatttaactttttacgtatttttgctatatgatattcaatagctctttgagaataacctaattgttcagctatttctatattggatttttctttagctattagatcaatgatttcactctctgttttcgttatattgttcacctttgaaaacccctttaaaacaaaatctttggaaccacgctaccatacattaggtccctttatttataatttaaaaacgattgactgagcccaatatttacttgatctttataaaaaattagcaggggattgccctgctaattttacaaatttaaaatttacttttacatcgtccataacaaactcctattacagaaccagttgcaacatcagctgccaacagacaagcatagcaaccagcaccagcagtgctagcacaagcaacaccacatagtgtggctaatgcagcgattgcccacgaagcaaccccttgtcccgataaacaagaattaaagcagttccaccattgcttaaacccctgagaagacatgttttttgttaaatcaactttttcaccattgtctttaataacaaaacctgattcaacttctccagatttattaatttcagcattataaatgagttttttatttttaatcacctttgaagcaactttcccagatttctcccttacaccaaataaagagtagtcttctataattttaccattttcatctagtataacgataaaattgctatctttttcgacgttttctccttttaaaggataatatgcataataaagcgttttatttccataattatcaactttcatcatatgtcttttgctgttatcaaactttatgtttttgctgtacttcttcatcaacgccagtttttcatctttttttccccaatctttaatccagtcatcaatttttaatgtttcagatttggatgctctacttaatttttcatctcctggctcataatccgctgatgcaaaattaggcaatatacacgaaattgccaataagattgataaagtcaacagtaggtagtgctttgcatcccaaatttttttaatcatatgatctctccctttcctttttttgtaatcataatataaaaaaattgcggttaaccgaaaatatttatatattcaatatttccttaagattaagtacaaagaacttgggatcaaaaacaaaacctctctgaaaatcgttgaataaccaatagtttctgcgtttccattaccaaaacaaccacaaccatacggaaaatatctaccgaaattagctattaacagaataagaaatattgtgattaacagtttataaaatattacaaaaaaatatcgaaatcgtttcacccagatcaaaaacgcaatcattatttcaataatggggactgcaaaccctactattagatacattgactcgggtatgtattgataatattgtagtgaaaatataaaactatatacgtcaaataatttcataaaaccagaatacagcattattattgatatgattgctacggatacatgctcaactttccgaattaaaaaagtttttatatttattcttagtctgttccccttcaattctattagtttcccttccatttttataaacgactaatgtcggtgtttgatttatcttataactttcccaagatttttgatcaccttcgatgtttaatataaggaattttccgtttattctctctcccatcggaataagatatggtgaaacccttttacaatgaagacaatttatttgataatagtatacaaatacgtgattttgatcttttattgcatttctcacttcatttgtagtagcctgcccagcatataaattatcttttttttgatagatatttgatgcaactgctatcaatgaacaaaatattataaggattgatattacaataattatgcgctccttttttttcattaaaactaacctcctttttaattttttattctctttcccggtttgttttttgaatattttatatgctaacgtaaggattctttttataaaagggtattttttaccatttcatatattatttcaaaattgattctatactgattaatgaaatttttatttcaactaaggttaagttcacttattattttttctttaccagaatttaaataaaatttgctatttttatcatttttttttacgatgtaaaggagattccattttggtaaaggggtgcagacagttgtcaaaacgaaccgcgtttattatgggagccagtcaggggatcggcaaagcgatcgctctgaaactggcggacaatggctttcataccgtcattaattcacgagttcccgaaaatatcgaatcggtaaaagaagagatcctcgccaaacatccggatgcgggcgtcaccgttctggccggggatatgtcggaccagaagacaagagccggcatttttgaagagatcagatcacaatgcggacggcttgatgtattgatcaacaacattccgggcggctcgccggatacctttgaaaactgcgatatagaggatatgacaaatacctttacgaataaaacgatcgcctatatcgactctatgaaaacggccgcagcaatcatgaaacagcacgaattcggcagaatcattaatatcgtcggaaacctatggaaagaacccggcgccaatatgtttaccaacagcatgatgaacgccgctttaattaatgccagcaaaaacatcgccattcagcttgcgccttttcacattactgtcaactgtctgaatcccgggtttatcgccacagaccgttatcaccaattcgtgaagaatgtcatgaagcaaaacggcatttctaaagcggaagcggaagaacggattgcctcaggcgtcccgatgaagcgtgtcggaactgcggaagaaaccgcggcgctggctgcctttcttgcctctgaagaagcctcctatattaccggacagcaagtatcagccgacggcggcagcatgaaaagcatataataaaaacatcccgctctcagcgggatgtttcttgtaatgaaggaaaggacaaaccgagcttttgaatccgcagcacgaattcccttaaatcaccctgttttgccaccattgatattctgacataacgctttccgccgctgccgaaaatctcgccgggcgtcacgacaacatgggcatgctccagcaaatagtccgaaaactggtgtgaagactcgaattcattcggaatttcagcccatacataaaaagtccctttcggtttttcaatgctccagcctaattccttttcacataacgccgtgaaaaagtcaatccgttctttatatgtgcgcttcagacgctcggtatgctcaggatttcctgacagcgccgccgctgccgcctgctgaagaccgccgaacatgccgacgaagacgtgatcctgaaactcattgaccgcctgaatgattttctcattccccacggcaaatgccattctccagcctgccatattgaaggttttcgaaaatgaataaagctccgcgccgaccgttttcgcttctttcgcctgaagaaagctggccggattctgatcaaattcgaacgcgccgtatgcaaaatcgtgaataaggtggatgtcatgtttttttgcaaacgctgccgctttttcataaaacgcctgatccgcagtcgcgcccgtcgggttattcgggtaattcaaaaacatcagcttggcttttttcaggacggcgggatcaatccgctcaaaatccggcaaatagccgttttccggatgaagcggcatctcatgcagctccgctctggccattgtaatgcccgataaatactcagggtagcctgggttcgggactaaggcgatatcgccgggattcagcaggcattgcgtcaaaacgtacaaaccagctttccctccgccgaacagcgcgacttctgtctccggattgaccgataccccgtactctctctcataaaattccgcgatggcttctttcagaaacggatagcctctgaacgggccgtatccgtgatacgaaggattcagcgcagcctcccgcaatgtttcaacgatatgcggcggtgtggggagatcgggattcccctgcccgagattaatgatctgggctcccgttttctccatctcttttaccttttgaaaaacgagcgaaaattcctgtttcggaagtgtcttgatgacgtcggacggtatgatttccatctgaaaggctccttataaatgaatttgctctgattcgttattccgttctgaaaaggatttattgaccagttttgtatgcagaaacagcccgctgaccaaaaggacgataaacgccatgatgactgccgcgtctacaatgttgatcagcatggaaccgacggcgatgcacaatccgatggaggcctccgccaccgaaaaaatccggccctgaatctggttcgccgcgttctcctgaactttgaccttcgccagcacctcaccgtattccattgcgataaagaaaagaatggcggcaatgactgacacggcgaaaatcggggtaaacaaaaacagcgcaagcgagacgatcgataacactgtaaaatacatcagccctttattgttgttaaagccccatttgctgacaagagcggcaccgataaagccgccaaagccgatacagaacgtcaggatgaaattgccgatttccccgtcgcctaaaaagcggctgacaatcgggaaatagctgtagacgacaccccacaaaagcgccatcgtaatcatcgtgaacatggcatttaacacaaaagcatttgttttgatttccttcaggccttctttaaacgactgaaaagcttctctcacgttttctgactgaatcggcacgtattgaagcttaatgcggctgatgaaaaacgcggagacaagataggtcaccccgttaaaggcgacggcaagctccacagaaccgcctaacagaaaaagtccgccggctgcagcgccgacaataatcgaaatcgtcgtggcttttgcaaacaaagtgttgatatttttaatatccgcttctaaagacgacatgaccgcgagacgtgccgggttaaaaaacacgccgcttccgtaagaaacaaacagcagcgccagaaaaagcagcggatattcgcctttcgggagaaatgtcagccccaaaaagatgacgcctctgatcacatccgtccacagcatgattttcaccctgtcgagccggtccacgagcacgcctaaaaacggctgaaacaccatcggaatactgcggaccgcgatgacgccggacgtcacccagtagtcgtgatagtatgtagacaaaatgagcagagccgggagaacgcaatagtctcccataaacgaaagcgcctgcccgaaaagcaaatacttagagttcggtttcagctgtttcataccggtaacgcatactttgcagtcagcttcgcctgctgctgaatttgtttgattgattcggccacgtcacccgaattgcttcctttcagctcgaacgccgcaatgctgttgaacgcttcgaacagccgcagatccacggatgtacccgcctcggccgccgagaaagaaacgatttcggtgtctccctttaagacgccgtcgggaatgtcaatgctttcaatgacgaaatcgacagccgtctcaggcagctggccgttctctttgaaatgctgaggatacaagtggcagtcggcgacatagcatggctcctgctccaataatcctttcggcagatcggcttcttttccgaaacagagaacatccaataacagctgcgccatatcgacgccgaagacctttttaatattcggaatcatgttccagcccgcaaatcgtgccgctgattcaatcagtccggcttcccggtttttcattaatttaatctctgtatgtgttgcgcagttttcgaggccgagtccttcattcgcctttttggctgcttcgacgattttccgcttcgcgtcatcatccaggatggacggcgtaatatgcgatgtctccgtgaatccgatttgcggtgttttatcatgaattgcgacagggaagtattctccgtcggccatgatgccttctatgctgatatagtcggaataaccgcttgtttcgtaccagtcgtcatactcgccctgcaaaaattcttccgcgataaacggcgcttcaaacgtgaccgctttcggtacgttgatcgacttcaggtattcattgactctgttaaattcggcttctgccgtttccatctctttgataagcgtcacgccgatggagctcgccagatatgtaggcttcagaatgagcggcgttccgatttcctgaagcgcggcgcggaaatcttccagcgtcgtcacccgtttgtttttgatagacttgacgccggcccggttgaaggcggctctcattttgtttttatctctggcattttcagcggcctgtatgcccgctcccctcaggccgagacgttcacacgcttttgccatcggagcgataaacagttcattgttggtcgtaatggcgtcaaccgcgaacatgccggccaccttgacgatttcttcgactacttcttcctcaggtttgtcatgatcttcatgagcccagtaaatcgaatcgggatgctcaaaatcagccagactcttaaaatagtctttatcttttatgaccgcgaccgagtatttttcaattaatgccgcatgagaggctgtaattgcaaaaggtctcggaataaagctgacgaggttgtatttttcggctgcgcttttgtaaaacatatgcggcgggcatcccccaaggtcagcgataaccaatactgtttttctctccatatgtaaacactccttctctattgtgcggtgtatccaccatctgcggtgatcgcgcttccggtcatatagcttgataaatccgacgcgagaaacagcatgacgttcgctatttcttcaggcttgccgagtctcagcagcggattgactttcgctttttcttttttgatttcttcaagcgtgccttcgttgttttcaaggaacgacttttcattcaaaggtgtgtcaatgattcccgggcacacgcaattgacgcggatgttgtgtttggcgtaatcgacggccatcgaacgcgtcagctgcaatacgccgcctttagaggcgttatatgcgggaatgtcgggccatgcaacgactcctccgacggagcacgtgttaatgatgttgcccttgccgcttttgagcatatacttgagcgcgtgcttgctcataagaaacatgcccgtcagattgacgttgagcaccttgttccaatcgctcagctccatctcatgaatcggcgcgacaatttcgatgccggcgttattgattaacacgtccaatccgccgaacttgtccgccgctgaccggatggcgttttgacatgccggctcatctgtaatatccgtctgcacaaaatgcagcctgtcattgttttctttcctgatcatcgcttctccctgcgcctcatcaatatccgcgacgaccacattcacctgctgattcagaaacgcctgaaccgcggcataaccgatgcctgatgcgccccctgtgatgaggacggttttatccgtcaggttcatgactctttcgcctctaattttttcgcttttgctctgttatagcgcggagggaaaaagatattgactgattttgaatctttttcaaatctgttgatggcgccgtgatcttctctcggatcgcagaaataagctgtgccgaatgtcatatccactttgcagccttcaatggtcatatcatagccgccgccgatgcagatgccgatttgttcattgcggtgtttatggaacggcatttctcccccgttgcccggaatgttggcaagcatgatttccacccagtcttccacgaagaacgtgacttccataccgggcaataagtctctcgttttaaaaatattcaaaaaataatcttcagggcttgtgtaggtttcaccggctttcaggcgtttaatatcaatggcgatcacttcttgatccgtctcatttcttgcgccgtgaggcacattaggaggcgcgatataggctgattccagcgctgtcatctttcttgtgacatctccgacagtcatggacagctcgccggaaacgacaaggccgatttggacttccttatgctgatgcggttccacgtttgtatgcggcggaacgtaagaaagcagaacttccgtatctcctctgacggacgaatattgtcttactccgttatcccattctattaatttaggcgtcgggaaataaagttcctgcaaatcttgttcagttttcatcatgaatctctccttttccgaataatgaccagctcatgggaatgcttttaaatgttttgacaaagtgaagaccgtacttttgtctggccagctcatttgtcagcgcgatgtcggacaaaccgtccttcactcttttcgcggctgcgctcgttgagttcaccagatcaaacgtgacatctttacgggtaaaatacttaatcaaattgataggagacgggtgggatacgatgacagtctgatcaagcatgtcatccgtatattcaaaaccgggccggacagccaggccgtacatcggggtgtcgcacctgaaaatttgcagaagctgcagatccggtctcatgtagaagtgcttaatgccgtcatacgcgtgaggcacaattgtgtattccagcggactttgaagcgttttttcaatgcacgattcaaatgtatcatgcagtgataatttgctgttcaccccttggagaagggtgaaattggtgatgaagttttttgctgcgtactcactgcttgtcccttcaggaccgagcgtgttgatcgtaatcagtttagatattgaataagccttgctttttgtttgaatgctattatccaatataatcatgagcaccaaccaatctgttaaattttaagtaaatattatccatagatgttcaagctgtcaatattatttgaaaatattgataattattcctatatattagaaaacaccctatgacatagggtgttaaaattaacatttataaaattatagaaactttattttaccgatacaatgtttggtcggcctgatgctcatatttcccatactttctgtatgcgaaaacgctgaggacaaagccgatgagggtgacggccgcacaaataaatccgacagctgcatatccgtatccgacatagaccggacccatgacagcagaacccaaggtgacggccaaattggacgccagactgtaaaatgccatgattttgccccggcggctctgtgagcaatcacttaaaatggtgctgagcaaggtcaccgtcaggctttgcatcaatccccagacgaataacccgatgaccaaaaacggcattgatgacggcgcataggcgagacaggaaagccatatgctgatcacggccaatgccgcgatcaaagagcgcattttccccgccttatctgcgatttttccggtgaacacgctcatggaaaaaccgattccgtacaccatgatcagcagccctgaagctgtattcccccccgacaggacgcggtgaagatatgtgccgagaaaggaatacatgccgtaaaaaccgatcatgttgcaaaaagtgatcgtgaggtatacagggacacggggcaccttcagcgcatcccggaaagtgcctgcctgctgtccgttttcctcttctgttttatccccatccgccgtgctgcggcgcgcctcaatgaaaatgagcgaagcaacgaggacagacatcatggcgaaaatccaaaacgtccaccgccaattcaaaacaccgccgataaaagagccgatcggaacaccgaaaatcaaagcgagcgaccagcttgacacgatcagacccatcaccttgccgcggtacgcataaggcacacggtcgccgaccaccgcatatgctgtcggcacaaacgcacccgccgcgagcccggaaagcgccctgcccagaaagaagaaaaagagattgtgcgccagcgcgcagatcaccgtgccggccgtaaatataagcagccccgccagcaggctgagttcccgggaatatttatctcccagcggaacgagaagcggcgccccgataaaaatcatcactccgtaaatactgatggaaagcgccagcacactgacatccgagctgaaagcctgcgctaaatccggaagcagcggagaaatcaccagctcttcagaaccggcggcaaatacgcctaatgtcaaagcaagcgcgagacagatcggaaatcggcgtttcgtttcgatgtgatcggtttgtttgctgttcatgctctttgaacacctcttccgtaaaacttttctaccttttgttgttttatagtttagcatccttatgtttcattttacatttcacatgaaaactaattccaattttttatttacattcagattttaaataaaatatttagtttgtattcaataaatgatataaaatacgccgtctggttatgctatagtgatagaatcatttgttaaggtgggggtcatggaatgaataacgctgattcaaaggccgcccgcgcaggcctcggcatggtactgattctcgggacgctcgcttcattcgggccgctttcgctcgatatgtatctgcccgctttgcctgaggtggcggccgatcttcatacgacagcgtcacttgcgcagctgagcctgacgttttgtcttttggggctggcggtcgggcagatcgttgtcgggccgctcagtgatatgatcgggcgccggaagccgctcattctgtcattgctgctttatacgctgtcttctttattatgcgccttcagcccttctgtttcgtttttaattgtcatgaggtttattcaaggattcaccggggcggccggaatcgtcatcgcacgggcgtccgcacgcgatatgtattccggaaaagaattgacggcttttttctcattactgatgctcgtcaatggggcggcaccgattttagcgccgattacagggggatttatccttcagttcgccggctggaaaatcgtatttgtcgtgctggcggtgatcggctgtatcatttctgccgccgtgcttacggcgttgcctgaatcactcccgccggaaaagcggacaagcggcggactccgggagacgctgatgacgtttcgcggcctgcttggcgaccggatgtttatgggatttgcgctcagccaggcatttgtgatgaccggcatgttcgcatatattgccggatcgccgtttgtactgcaaaacatctacggcgtatcggcgcaaatgttcagcctgctgttcgccgtaaacggtgcgggaatcatatgcgccactcaaatcaccggacggatggccaaaacacatgatgaacggaagctgtttgtctccgggctgttgatcgccgtcatcggaagcatcgctttgcttttatcacttgcgtttggttcaggcctgacggcggtctgcatttctttattcatcattgtttcttctgtcgggatcgtcacgacgacggggttttctctggctatgcagaaacaggagaaaggcgcgggaagcgctgcagctcttctcggactcctgccctttatcggcggtgcggctgccgctcccctggtcggtattgccggagaagaaaatgcctggccgatggccgtcagcattttcggttttcagttctgtgccgttctatcctatgtcctgtcggccaaacgaaaaacaaagtaaagcccgccgctttttgcggagggctttttttcttatccggcagcgcctttttccgaagaagccggctcacgcttcaggcgttttttaataccgaagtgataatacgcgtaacaaatgatcatcagcgggacgccgcagtacagaccgatacgctggtcggggataaaaatgagactgattaagataagaccgtaaaccgaaaatccgagaatcggcacgatcggataaagaggcgttttaaatgccaggtctttcagatttcctccttcagcgagaaagcgtctccggaaaacgaattgtgaagcgcagattgacatccacgcgacgacggtaatcataccggagatggaaatgagccacacatacaccgtttcagccgcgaatacacttgtcagcagggataaaccggagatagcgatggtgatggaaagagctttcagaggcacgccttttttcgtcagtttcgttaaggaagcggggcccatcttagtttttgatagggaccacatcattctggacgaagcgtacagcccggaattcgccaccgacagcatggcggtcagaatgacaaagttcatgatatcagccgcatagggaacgccgattttatccagcacagccacaaacgggctttcgatgacgcctgccgtttggtacggcaaaatggacacgagaacaaacatcgccagcacgaagaaaaacagcgtccgccatatgacgtttcggattgagcggggaagcgtcttttccggattttcgctttctcccgaggcgattccgaccagctcggtgccctggaatgaaaaattcaccatgacaagggtaaacagcacggcttgggcaccgttcgggaaaagccctttgtccgtcgtaaagtttgacagatacggagccgtctgcccgccgttaaaaccgacaaagccgaataccgcagcgcagccgagaataataaacaatacaatggccatgaccttaatgctggaaaaccaaaattccatttccgcaaaactccgcgcagacagcgcgttaatggaaaaaatgacgacgccgaatacaaggcaccacacccaaatcggaacggccggaaaccaccgctgcattaaaatccccgccgacgtcagttcaagccccactgtattggcccagctgaatgcgtacatccatccgatcgtaaaacccgtcgacggcccgagaaactttgcggcatacgcttgaaatgatcctgcgaccggcatggcgaccgcgagctcccccaaacaaagcatcaccagatacattaaaaatccgccgatcacataagccaatatcgcgccgatcggtcccgcttcactgatcgtaaaaccggagcccagaaaaagccccgtcccgatcacgccgccgagggcgatcataaacaaatgccggcccttcatcgtgcgctgcaattcagtttgattggtatctccctgcatatacatcctccttattccgttatgtcagccatttgtgcgtatgtctaatcggtagctgtgcaaaaggtgcattgtcgtctgctgaatgagctccggcagcacatggaatgtgtacggcttgtacacgcgttccgtccatttatggccgtcctttccgtatacccctatattgaccgacggaatattcaattccctgatttctttaaaaggaatcgtcccgatgacatcccagcccggaaaattatcggtaaaggcggagacctcctcgtctgtttcatgcagcgataaaaagcttccgtccgctaaataagggaaaaactttttaaagacgaatgtttctccggttgatgccgctgttttatcgaccgcttcttgaatgacatgctgcaagagccggtcccgtgtgctctcttctttcagataattgtgcggaaggtaaggcggcgcatagaaaataatgaccttggctccctgctcaggatcgagtttttgcagttcctcgacggctttaaagcatctcatccgcagttcaagatgttcatatgttttaaatgcctgctcgatacactgtgcagggtctatcccgcggcttctaagccttttcaggtaatcttccagactgtacacttgaacgttccatgacatctcttttttcggcaggctcgttctctcacagtattcgtcgtaataatcagataattttcgttctgtctctttgcaagcttcgtcagtcacggcggtcagctgatccatgacttctttggcggttttctcgtaaataaaataattaaaatagacatagctgctgacggcggtctgcacgttatacgcttccttgttgtcacgctggtacaggcaggtcggcggaagcacaagctccccttcaatgttttccgccatatgaatattgttgtgaattcttctggtgatttctgatgcgatcaaattcggatcgatgccggacagcgtatcaccgacatgcacctcccgcccgtaaatcgcaaagcaaggcaaaagcttccctgccgcgcccgtgtagatgtaccttgtcgtgtcaccctcatacagcggggtgataaaatcgttattaatcgctgctaaataacgaagctgcttttcttgtttcagccgttttaattcagaaatgctggttaaaatgccggaatgctggctttcttcatcggggtttgccatgaacagaatatggcccggcagctgatcgcgccgttcagaaaagtgaagcagattggcgagatgaacggcaataccgctctgcatatcaaccgaaccccttccgaacatccactcgcctgagcgggcgtcccgctgcacatcccgatcaaattcatagtttgagaaatactccgcgagacggtcggaatcaaaagcgatatcttttaaagggccgaaatcctcgatgccgaccgtatcaagatgagcgtgataaatgaccgtattcaggctttcgccgtttccctcaataaatgcgaaaatatttttgcggccgtaagggtcctcaggaatcgcctgctcccacacatgtgacggattctcctgaaagtagggaaagctcttgatcatatctttgatatagtcggctttttttccttctcccaatgtgccgttgatgctgtttaacgccaccagtgatttcgtaatggcttctattttctcctccggaagcattttgctgagctgctgatacatgttccatcctccttaccttcatatagagaaaatagcgcgactctctttttcatcgcgctatttccgaaagattaataggcttcagacgttgtttttgcctgcatatgaagaatcagatagtcaggtcctccggcttttgaatcggttcctgacatattgaagccgccgaacggctggtatccgacaatcgctcccgtacatccgcggttgaagtatagattcccgacgtgaaaatcttcgcgggcgcgttcaatgtgcgcacgggttttcgataacagagcgcccgtcagtccgtaatcggtattattggcaatctcaagcatatggtcgaaatcacgggcttttgagatcgcgacgaccggcccgaaaatttcctcctgcatcaggcgggcgttttcatcaacatccgcaaaaatggtcggctgaataaagtatccttttgaatcatcaccttcgcctcccgtcaggagttttccttctgttttgccgatttcgatataattcatgactttattataagatgcttcgtggataactggccccatgtatgtatcaaaatcttccggacttccgacggtgagtgattttgttaaagcgacggctttttcaacaacttcatcatagacgtcctgatggatgaccgcacgggaaccggctgaacatttttggcctgagaatccgaaggcggaatacacgattgaggaagcggcaaggtcaagatcagcatctctgtctacaagcaccgtatctttccctcccatttcggcaatgacccgtttcagccacttttggcccggctgtacttttgcggcgcgttcataaatacggcatccaaccgcgcgggaacctgtaaacgacacaaatctcgtcttcggatgctcaaccagatagtcgccgatttctcctccgtcgcccggtatgaattggagcacgccgtccggcaggcccgcttctttcatcacttcaacgaatttcgccgccacgacaggcgccgcatccgccggtttcagcagtatcgtgttgcctgttacgatggctgccgccgccgttcccgccataatcgcaagcgggaagttgaatggagagatgacgatccccaccccaagcggctcatagtgatactgattatattctccgtcacggctctttacaggggaaccgtctttcagtttcagcatctgacgggcgtaatactctaaaaagtcgatcgcttccgccgtatccgcatccgcttccttccacggttttccggcttctttcactagatacgcggagaattcgtgctttcttctgcggatgatcgccgccgctttaaacagcacattcgcgcggtgttccggccgtacttttttccatgtttgaaatgcctgcagcgcagcctgcatggccttttccgcaagttcttttccggcggccgatacagaaccgatcacttcttttttatctgccggattgacggaaatgatctttttatccgtttcaatcgcttcaccgttgatgataagcggataatgcttgccgagctgtgaattcacataagccagcgcttcctgaaacgattgtttatttgtctcttcctgaaaatttgtaaatggttcgtgtgcgtatgaaactgtcattagaattcctccccgtattttgtaatgtgtgctcacgctttataagatgcaagaagcataccagcatagcaatttgtgataaaaataagaaaatctttgccgaaagcggacgaagcttgtccgaatctgtcagctgcaatctgaaaacgcaaagaaattttgcgatccgctatataactgatgcaaaatctctttgcggataacacttatacccagccgcggaaacgggccgcttcagccgactttctgatgcccgtcatataggcggccaaacgcatatcgactttgtgggtatgcgctgtctgataaatggattcaaacgaattcaccatgacgctgcgcagttttccggcgacttcctcctcagaccagtaaaagccttgattattttgcacccattcaaaataagacaccgtcacgccgccggcgcttgccaaaatatccggcacgagaagcacgcctctttcattcagaattttcgtggcatctatcgttgtcgggccgtttgccgcctccacaatgattgaggctttaatgtgatgggcgttttcagccgtaatctgattggagattgcggcgggcacgagaatatcacagtccttttccagcagctccctgttcgttatgacatccgagaagagattcgtcaccgtgccgaagctgtcccgcttatccagcaagtaatcaatgtcaaggccgtcagggtcatacaaagcgccgtgggcgtctgagatgccgatcaccttggcgccggcgtcatgcataaatttagcgagaaagctccccgcatttccgaacccctgaatgatgatccgcgcattttccaatggaatcccttttttcttaacggcttcctcaatacaaatcgtgacgccttgcgcggtcgccgtctcccgcccctgtgaaccgccgagaacgatcggtttgcccgtaatgaatcccggtgaatcaaattctctcaggcggctgtattcgtccatcatccatgccataatctgcgagttggtatatacgtcgggagccggaatatcctttgtcggaccgacgatctggctgatcgcacgcacatatccgcggctcagccgttccagctctccgaatgacatcgtccgcggatcacagatgatgccgccttttccgcccccgtaaggaagatttgtgatgccgcattttaaagtcatccagatggaaagcgccttaacctcttcttcactgacttccggatgaaaccgcacgcccccttttgtcgggccgactgcgtcattatgctgtgagcggtagcccgtgaaaacctgtactgagccattgtccattttgacagggatgcggacggttaaaagccgcatcggctctttcatcagttcatacatattgtcagggtatcccagttttcgcagggcctcttttatgatcgattgtgttgacaagaacaaattaagaacttctttttcttcatctttctgattgcttttagaaatcgggttggctgacatgttttatcacctcatcgtattttacgtgtaagcttcaattaccggcagaacaaaatgtaagcgcttttacaccaaaacccatcaatccctttcacattgtcgttacgcccctttttatatgcaagattcatgccaggtttttgcttataaaaaaaagagactgttgtcagcctctcagattaaagagaaaggggatttgaagacgtatacagaagaaaccttactgcttttattaaaatttaatacgtcttaaacgtacagaaaacgttgtttctttgaaggggacactatttagagatatacctcctcccatttgctctactaatctcttagtaatcgtcagccccaatccgcttccctgataattggtatttctcgagtcctccaatgtgtacattcgttcaaagacacggtctttatgcatttcttttattccttttcctttatctgatatttctacaaaaacatcattatcagttattctgatctttaaacccaccatcttaccatcggaaccatattgaattgcattcgtaattaaattattcagaaccctctcaattgcatcttcatctccgctaacaaagacagaatcatcgggtatatcaatcactacttcaaattctttgctaattaaaatttcgtagtaatccaaaattatttttcggctgacttcacatatgtcaattcgtgaagaatttaattttttatctcctgactctaattttacaagttcaaaaaaacggtttattaacgctaatacctcgaccgtttttaaattaactgtttttagtaaactcataaccttttccgaagtcagacttttatcgttatttataatttcaatataacctagtataactgttaaaggcgtctttaaatcgtgtgaaatatttgataacatttttcgcatggacagttcaatactattgcagttccctttgatcttttgattatggtctaaaagacggtttatttgaattaacaaggattttatatatttatcttccgtgttaagcaataatctttcgcctgtctcttcattaacaacttttcgaagtttatttcttatatatttaatctcagtccttagatttaatcggcttcggaaaagaaatatatttactgctgcagagcatatgaataaaataaccaacatataaaacaatttaaaaatctcccaacttataaccgattccccacaaagtttttatgtacattggatgagatggatcgtcctcaattttctctctaagccgtctaatatgaacattaattacattctcatctccatgatactcatcttcccatacggatttataaagttgagacttagtatatacttgtgaaggattagaaataaagagttttaaaatattaaattcttttgccgtgagattaatcttttcattgaattttttaacagaaaagccatgcaggtcaacacttaaatcacctattttaatgattttttcttcctttgaagacagggagctcttatagtgtctttctcttctaatggttgctttaattctggctattacctccagcatagaaaaaggtttagaaatataatcatcagccccgaggccgagaccaagtgccttatctacatcttcatcttttgcagacatgataagaacgggaaccatacttttggaacgaatcattcttaaacattccatcccatctatcttcggaagcattaaatccaacaatataacctcaaacttttgggtgttcaatatgtctaaagcttcttcaccattaaaagctgctgttacttcaaacccttctttcgttaagctttcgcttaccatatcgcttatgaattggtcgtcttctacaattaatattttgtaacccaagctttccgctccttaaatataaaactgatattcttaattcactgtttatttcaatcattatacagataattaatctcattataattattttttatacaaaaggagataaatattccaaaacattttaaatacaaacaaataagacaaccattcttcaatagggggaattgttgtcttgtgtttttctctttttatctcacctttatcgaaccatcttcactagatagacttactttattacttcccgcgccaatttcaccttttttcagttttacgccatcatggctcttattaagcccatctagatcaaacgttacatcagaattactctgagcaaaaacagcaagtgaagttggcgcttttttataagatacacctatatctcctgatttcgtatttactgataaagattttccctctgttatgtccttgattgaaaccgtcccatctttagaggtaatctttacattggaactatctatttccttcatctcggtatcgccgcttgctgatgttatatttaattcctcaaaagaactattttccatacttaacgatccatccctggatgcaaattttccattatcagccgaaacattattgattttttcctcaccggaatgattttcaacgacaatattttcagctgaaatttcacttaaatgtatagtcccatctttattggttatttcaatattgttcatacctgactcgggaacattaatatagattgtgccgccctgcttcccaaaagtaaatccatccaaaaagccgccattcttttgttctttttgagtaacgaccaaacccctcccattttcttgaaatgtaactggagccttatctttcttcttcccctcagcagatattgttgccttatttgaattactctttttaaacttcacatcccatgagtcaatatatacttttaaagtatcaattttttcaacattgtaggacacgttctttttaaagttttttgtatctgtcttataaaggcttaaaacaattccgccgattacgattaacactgcacaagatgctataattttcttcattgtagaatttctccttttatctacaataaatctttctgatccaccttacggtaagaaagataacccactaaaaaaccaaataaacaaagtataattggaatgataataaattggcttaaactgactgtttctcctccgtcggaaactgttgcattgataaggaccccgattatgacagcccaagtgattgtagcagaagttgatttttttctcatgccgaaaaataaaggaatcagactcactcctcccatcataaaagcggtgagaagagtcgatggcatagcggaaataacttcactcatttcaacaggcttctcgaataaatataagtgcggactcacgaagagaattaacaagttaataacaaacgtagcaataacaatacttacaaagcagaataggaagacaatagatagtttagcttgcattaatttttttctttgtaaaggataagtaaacagcaattgtattgttttatttttatattcatcaataactaaacgggataaaatcacagcagaaaaactaataaacacaattctaattaaaatattagttagagatataaaatctgcataatcacgaaacataagttcattttcatttttagattcccatcccataaaagccgctaaggcaaagatgatgaatatccaaagtgccacccatttaaaatactgtgataagtgatgttttttgtactctaatttcataagttttaacatgctaatagcctccagcagaagaatttaagacaatgcaaataggtgcataacacagacgggcaatctatctaatgtgtattccctccccattcatagaatttaagaagtattcttctaaagaactgtgttttttatttatactttctataccaatgtcattcagaataagtgctttagagatttcttgttgtgtaactgctgtttcatagatacgaattaattgttgatcaatcattttaaaatttcttatccccagattttgctctaaaatatataacgctttttttatattttggacttttacctctatatactctgtttgttttccgtttatactcttcatagaaacttcttttattaacttgccattctgtatgataccaacagtatctgacatttgttccatttcggctaaaatgtgactggagactaataatgtaattccatattctctgcaaagtaatttaaagagatccctcaactcttttatacctattggatccaggccattaatcggctcgtctaaaatgagaagttctggtcttgtagaaatagctctggctattcctaacctttgtttcattcctaaagaaaactctttcacttttttattatcaatattatgtaactttacaagctcgatggcgtggtcaatggattttttatcgtaatagcccatatattcacaatggaaatctaaattttctttagcagtgaggttgtcatagaaaatgggatattcaataatggtgcccattctttttaaaacttcaaatgacgtatctgttaatttctcaccgaaaatttctatttccccacttgttggcttgattaaatttgtaatcattttcataatggttgttttacctgcaccattgggacccaagaatccataaatctccccttttttcacgtgcatattaaccccggaaacaacttcttttcctttaaatgtttttgtaagctgactcgtttttaagatgtatgtcattcgctttcccctttccatatatactcctactatataaaggaaagttctcttttctcttaagcaaatattacttttttcttaagatttttctaattaaatcctatccccattctataaatcattttttatttttttaggatgcatgatgtccgtaggagaagaaagggaggatctcttaaatttcaggtccctaactgaccgccatcttccaagacatttttgatgaaattgctcttcaggccagcaatcatgatatagtgggcggtcgtatcttattcactggctccactcatatcaaagtcaataaaaacacaaaaacgaagacatccgctgtcttcgtcttgtgcgctatcggtgagccgtctgccagtcaaatccgatggtgtcatcattccacgggattcttttttcgtcaggctgatccggattgtaggacattgtcgtgaaataaataatggtcagcggggtttcgcccagcactctgtacccgtgtgcgacgcctttgggaatgagaaggagcatcggattgtcttctcccatgtagtagacatccgtttctcccttggttgccgactcttcgcgaaggtcatgcagcacgacctgggcgtggcccgtcggaaaaaaccataggtcatcctgtttctcatgatagtgaaacgctttaatgacgccgggatagcttttggaccaggaagcctgcccgaaacgctctaagagatgttcatcgtcacggacgagttctgagaaaaaaccccggtcatcgctgtgtttgatcagctttttgatttttacgccttcgatcacttgcactgtccctccctttgtaaataatcatgcagcgcttcccgccaatgcctcatcccgagcccctgccgttcaatcgactcaagactcaacaccgagtaagcggggcgcggcgtctcatttccgtattcctccgtcgtgacgggcagcacggcggcggttctgccgctttcttcaaaaatagccttggcaaattcataccagctgcacactccgctgtttgcggcatggtataagcccggcggcctgtcaaacagaccgatcaccgtttcggctaaatcttttgtatacgtcggcgctccgacttgatcgttaacgacacgcacctgatcatgtgtatccgcaagcttcagcatcgtattgacaaagttgtgcccgccgctgccgtacacccacgatgttctgataatggtgtggttttttcccgtcaaccggatcagttcttcgccgagttttttgctttttccataaatcgtgcccggatctgcgggatcatcggtctggtatggccgtgttcctttgccgctgaagacgtaatcggtgctgatgtgaatgaatttcgcgccggtgttttcagcctcaagcgcggcataataagcgccgattccgtttattaaatacgctttgtcgagctccgtttcacatttgtcaacggaggtgtatgccgccgtattgacgacgatatccggcttgtaatggctgaacgagtgccgcaccgaacgctggtcggatatgttcatcatcgcttttgtcaaggcgatcacttcatacccttcccgcttcagctggcggcataactcccgccccagctggccggccgctccggttactaataccttcgtcaatcggatccccttctttccgattagtcttggctgtctgtataccagcgaatggttcttctcattccttcttcaaatgtgacgtcctgccgccatcccagctcatttttcagctttgaagcattgatggcgtaacggcggtcatgcccttttctgtcttcgacatgagcaaaccgttcctcgacaccgagctccttcatgataaatgacgcaagctctttattcgtccgttcatttcctccgccgatattgtaaatgtcaccgagtgttcctttttccagcacgagcttaatggcgcggcaatgatcttcggcaaacagccagtctctgatctgcatcccgtcgccgtacagcggaaccggcgtgccgtttacggcatgcctgataatggtcggaatcattttctcgtgatgctggtacggcccgtaattgttgctgcaccttgtaatgatggcaggaagcttatgggttctcacataagacatgacgagcaggtctgagcttgccttgctggccgaatacggattgttcggagaaagcggcgtcgtctctgtaaaagcgggatcatccggcgccaaatctccgtacacctcatctgtggaaatgtgaatcagcctgccggcttttccctgtaacaccgcgtccgccagtcggtatgtgcccattacatttgttgtgatgaacggctctgcctgatttatgcttctgtccacatgggattcagccgcaaaatgaatgacagcgtcatacatttgggaaaaaactttgtcaatgtcctctttttccgaaatgtcacctttgataaaacgaaaacggccgttcttttttaaggcttctatttcaagcggcctgcttgcatacgtgagattatccaggacggtaatctgcgcatctgtttctttcagcatcatctttgtaaaggtaaggccgataaatccggcgccccctgtaattaaatatgattttggcatgattaatgctcctgtcctttctgtaatgcctgatgcgccaggcttccggcgaggtagagcgattcatgcgtgcccgcatccacccaccagcccgttaacacatcatacgtcagctcactgtgttcaatgtataaattattgacatccgtaatttccagttcgccgcgttttgaaggggaaatttgttcaatataagaaaacacttctgcgtcgtacatgtagatccctgtgacgcatagtctggtcggcggctgctccggcttttcaatgatcgacttgatccgtttgtttttctcatcaatctcggcgatgccgaagcgctccggatcgtccacttctttcagcagcactttcgctccttttccctgctttgcgaaacgctccgtataaggttttaatgaatcttcaaaaatattatctcccaaaagcagaacgaacggatcgcgcccggtaaaccgctttgcgtatgataaaccgtcggatatgccggatgcggcgggctgaacctgatatgtgattgagacgccgagctcttctccggtttcgagaagtttatgaaattgcggaatgtattctttttgcgtaatcagcaagatatccgtaatccccgcttcttccagcttcatgaccgaccagtaaatcatcggatatggaccgacagggagtaaatgcttattgaccgcttttgtcagcggcataaggcgtgagccggtgcctccggctaagataacacctttcacatgaacacttccttacgtgtggttttatcacaaatcataaagaatcgccgcagcccgtttgatgcccctgccgtcaaccagcggctttccgttttgatgaagcccggtccgcagcggataatcagcggccatgtcagacatatgccgtgcgagaacgtccggtgatatgcattcaccaaggccgagatgaacggcggccccccgtgcggcgaatttttccgccgtctcagtttgatgctccacttgagaaagtacgatgcagggcacacctgtacaaatggtttcatataaagtgatcccgccggacacgacggccatatcagccctcgaaagaagcgcggccatgtcatttgtctgccttaccatctcggcataaggcatttgtgtaagatgcgcgcgcacgtcatcagcatgagccgtggcgccgcccatgacgatgatcactcgttttcgatgaatgtcggggatgcggcggcatgcttccatcactttaaagacaagcttcttcgggtcgcttcctcctaacgagaccaatatggtccggcattcttttctcagctgataaagctgtttggctttttcaaaacccggatgaagaatcatatattccgggccttcatataccgcggcgctgcccatttgaaccgtccggcttttcagccctccgtaaatgccgtttataacggcatcgcataaatgaatgacatgttcccgtttttcttcaaataagacgatgcgtgccgatgaatgctttttgacttcctctaaccagtcacacggcatatcgagcagatcgaatatgagaaggtcaggagcctgcctgtttatttcccggacaataaattccttctgttccttgtcaggcttgatgatcacttcccattgatcagaagacagataagaagaagcctctttatttgtgtagaacgttattgagcaattgttcttaatggcaccggcaagcagcttcatccggaccgcgtgccccatgccgatgtcacggcctccgtccgcgaaaatcaaaacccgcatgctaatcagcctctttttgccggatcatttgattaatggccctgagctccggatcacgattcagcagatggatcaattcttttgccggaatatcaggacgcgagcccgcttttacgtacagctcgcgggccagcctgtagtcctcttctgtatcgacggtcatccgcaagtgaggagcccggagttcctgcggaggctcaggaaagagaagcaggtacttctcaggagattctcttattaaaagcgtgacatgctcctggtatttgtccgccagcgttttgtcggcattgatctccgttaaaagtcgcgcgtttaccgcctcgccgccgatgccgagcggtgtaccgcaaatatacgtgtagtctgcgtgctgatctaaatgcgattgaatcagaaaatcaagcagcgaagggtcgacaaacgggttatcccccgtcagtctgactgtgatgtccggtttaacttgttcgatgacttgtgcaaaccggtcaagcacgcgctgctcgctgccgcggtgcacacggtagttcttgctgatgcagtgcgcagacagaatgtcgtcggtcttgctgtcagacgaggcgacgatcagattatcccgcgattgatcataatacgcgctttgccgaacccttttgacaatcatatcgaggatcgtatacccgccgatcggtttcagcactttgccgggaagacgcccgcttcccatccgcgcctgaatgataaacaaaatgtcagtcatcatatgggctgcctttcgtcaaaaggtcatcccaagtgatgcccgtgtcggcggggatatccctgaccgcacgcgcgccgtcagttaaaagctcaaaatatctcgggtgaagcccctgcggtttttggccgggacgaaggacggcaaggttttccgccgtaaaacattcgcctttttgaatcggcgccgttgaaaaaatgcctctgtaagcgaaccttctgatatccccttcaatcggtgtcgtggttttatgggagcttcccgacagcacttccggcaccggagcgtgatgcccccgccgcagttccgcttcaactgagcggatcgccgcaaccatttcttttaattcatccggattgagggcgaaggagtgatcagcaccgggcaggtttttatcgatcgtaaaatgcttttcaatcagtttcgctccgagcctgacagccgcgcacggcacatcatacggatgggcgctgtgatcggagaaaccgatcactgcatccgggaatgcggcggcaagcatgggaatgacgctcagattgctgtattcaggcggcgcgggatatttcgctacacaatgcatgatcgcaatttctgtgttcccctcgccggtaatggtttgataagcctcctgaatatctgaaatatcagcacccgcggtggaaaagataatcggtgtcttcagtcccgcaacatatttcaataacggcagatgattcagctcgtaggaggcgattttaaaggctgaaggggaagtcgcatacagtaagtcggcagagccttcgtcacagaccgtgcttaaaaacagcacgccttttttcttacaatattcaagcagcggttcgatccattcggcgggcatttccattgattgcaccaaagaaaaaatagagacgttttttcccgcagcggttttgtacaagccggggtctttctgatacattttgtcagcctgaaacatttggaacttgaccgcgtccgcgccggcctcactggccgcacctatcaattcaaacgcctggctcagttttccgtcatgattaattccggcttcggcgatgatgaatacgggcgaaccttcgccgattgacttcgttccgatttggcatgatgccatcagtccgcctccttcccgggccacacatgatagtagtaataggacgcatccgctttaaatcccattctttcatacaggcggatggctcttacattgtggagctgcgttcccgctgatacagtcttatgctgaaagcgcaatgattgttcaatcacgtgcgccgctaaatggaatcccgctccctttccttcaaatcccggctttaccgccatcagatcaaggacgaattcatcgcctttagacagcccctgaacaaagcccacagtctctcccttatatgtggcggcgaattgtaacgaagctctgccttccgcattattccgcgcccactcttcaaacaggcggtttgcactttcatagctgagatgggggtcttggtaatacctgctttttgtaaaggcgtcgcgggccagccggctgatcgcttccgtgtcgccgggtccggcttctgtaatctcaaatggcggcgtgctgttatatacacgcaccggactgacgagcttgagaagactccctacaaaataagcgttcggaagctgctgaacgacctgcatcgcgccgatatcttcagccggtattttaataaatataaaatcagtgcctgccgcccgccttgccgcgtaaaattcctgaaacagccttttgagctgtccggcgctgtttgcggctgcaagcttcacattgatgatattttttcggaacaattgactttcccacgaagagttttcatataaaatcacgccttgaaggctgttttcttccaataaacagagcgacgattcataggcttccggctggatgcccttctgatgcaggaaggtatgaatcatgtcctgcgcaagattttccctcagtctgtacacctaatcagcccctttgacgatatccgtaacggctgcaatgacgtattcaacgtcgtcatctgtcattgacggataaagagggagtgacacggtgcggtgataatacgcggccgcggccggaaagtcagtttccttatacccgtacgttttttgataatacggatggaacggaaccggaataaaatgaacacttgtgccgatattatattggtcttttaaagcggaaatcagatcgttccggctgaccccggcctcctgctcctctatttgaagaacatacagatgccatgcatgccgcccgtcatcactgacatgcgggatggtcagccctttcatgtgtctgaaggcgtcctggtagcggctcgcaatgtcggctcttctttgctgcatgctgtcaatccgtttcagctgatgaagcccaagcgctgcctgaagatcaaacatattcattttatagccgggcgtttcgacctcgtagtaccagcttccgtttgaagaatagcggttccacgcgcctttgctcatgccgtgaaggctgagcaccctgatctgatcggcaagcccgtcatcgtccgtcgtcagcatgccgccttcaccggttgccaggttttttgtcgcgtagaagctgaatgccgtcgcatcaccgattgatccgatcattttctgtttgtaagtggtatacacggcatgtgcggcatcctctaagacaaataactgatgcttttcggcaatggccagaatctgatccatatcacacgactggccggcgaaatgaacgggtacaatcgcctttgtccgcggggtgacggccgcctcaattttttcagggtctgcattcagcgtaagcggatcgatgtcaacaaacaccggaacggcgcctgtgtgcacgattgtattggctgttgaactgaacgtcacggcagacgtgatgacctcgtcgccgggaccgatccctttcgccttcagggccaaaaacaaagcggcggtacatgagttcagcgcgatcgcgtgctttgcccccgtccaggcggcaaaggctttttcaaacgcctctactttcggtccctttgaaagccagcccgattcaagcgtatcaataacctcctgaatttcgtccttcccgatcatgggcaatgaatagggaagaaaagctgatcttttttgcaccattttctttgcgctcctatcttttttatgaagggtcaacccgtctgaagctgactccggttttttcctgaagcacttggcataaagcggcaagcgaatcctgaaccgggtagttcgcggcgacaaaagcacggcgcgcctgttccgctttttgatattctgcggggctttcgcatatccggattaattcctgagcgagtgcctgcgggtcctcaaagacaaattctccaagtgagtgataataagggtatctgcgggttcccgctgattttccgatcagcacgggcttttgaaacagcatcgcttcaagaccgaccgttgatgtctgtgtcaccgcagcgtcaacatacgggagaatatcatacagctccatctcttttttgatgattttgcctgctttatatttccgcagcacctgattgtaagcatccagcttgtttttgccgatttcccacggatgcggtttaataatgagctgcatgttcttttggccggcaagctcttcaagcactcccgtataaaattcatcagaaaacggctgcgtggcgatcagcaccgtccgctgtgacgggagaaaagaaagtttgcggtaaaacgtgtcctgatctatcggctctcttgagaaaatctcgtcgaaacggggatgccccgtgatgatgatttgttcatccctgcagccttttgctttataccactccgcttcataagccccgaatacggcctgatagtccgtaaacacgggcagaaacgcttcatctcccatgagcgctccgtgctgaagacagatgctgacggcgttttttttcgcggacatcagcgccagcacacggctgtaaatatcctccgtcgtgccgactacaacagcggaaatcttttcggccgtaaacaaaatatcaatagcgtcaatcgcttcaataaataatggaatgtctttatacaaacgttcctgaaattctctgtttccgaaagcgggatggctgtgaagctctttcagaatggaatgggctttttcaatataagggacggggttcccttttttccccattcccgtcagctccaatttgcagataacgggcagcccgtaatggtcaggcagactccatctggccagtaccgctgtttttgccggatcaaactgccggtagtttccctcggtgaaccgaagatgatcgaaatgcagaatgacttttccgtttaccggtttctcatctgttttcttaatgttttgccttttttgatcataatatggctgtataccggcttcaggaatatgctgatcagccggaccgaaaagctctgggttctgctccatgctctcccgaagcgccggactgatatattgataaaaattactgatcaatgcgagcgggatgtctttgtagcgaagtgactgaaaaaggtcaatatactgccggtacagcacccaatagttcgctaagtatgccgacaagccctcacccctttccaagcttttttaatgattccctcagctcccggcacgtggtctgctgcggaaggctgttcacaaactcgtttttctccgccgcgaaaagctgataatggatggattgatcggtaatataattgatatcaagctcctcagaaatcgggtaaaacggataaaaatgatttactctccagaagaaacgggcgtcaccgatccggtaaaacgcggggctttcatcccaataggaaccgaatgccgatttgacctgttccagcacggaaaaccggtgcatgaccgaacaatggtcaatggcgcacggcgcgttccacacgatccgttcggcgggcctggccgtctccttcaccgtctctttccgctgattcagatgataggttttggaacttgaatacacgacggctttttccgggtcttcatcaagctctttcaccattttctcaagccgttccggcacatacgtgttgtcgtcggtcgcatacgtcacgtactcgccctccgccatttctattgcctgattaatcaaggcggcgtagcgtgttttttccgttctttctttgacgcccgatacatcgctttgataaaaccggatgcggtcatccgtgagaaaaggacgtatttccgccaatgtcgcttcatttgagttgtcatccataatgaacagctcaaagtccgtaaacgtctgagacagaatacttttaatagagcgggccacatagtcacttttgttatagctcgtcatgatcactgacactttaggcaactcgtcacccccttttcgcacctgaaactaccgctatcatatgttccttatgcggaagatgcgctaggaatacagactattatgtgaaaagtcagcattgcgatcacaaaaaaagccggctctgatgcccggactcattggagcgtattttcttttttcgcataaatctttctttgggctcatatggtggaatagataaaaacagcagccgctctgtcggctgtctgatacttgtcaggaggtttcagcatcaagaggttttcatcaaaggaggaacaatatgaaaccgaaaaagaatcaatatcagcaaatgcaggggatgggaatgggaatggatatgcaaggataccagccgcagctcgggcctaatccttatccgcagcctcagggccaaggatcacaaatgatgccgatgcagcagcaaatgacaatgccgatgcagcaaggccagcagagcttcggcggggggttccccggccagccgcagcagcagggcggcggcagctttcagatcccgtcaggtccatcatcgtcacaaaacgttcccggcatgctgccgattgaagagtcatacattgaaaatattctgcggttgaaccggggcaaaacggcgacgatttatatgacatttgaaaacagcaaagaatggaattcaaagattttccgcggtgtgattcaggcggcgggacgtgaccatatcatcatcagcgatccgaaaacgggcacccgctatctgcttctgaccatttaccttgattacatcacgtttgatgaggaaatcgcttatacttatccgtactccatgtcttcttattccccgagataaatcaaaaagccaatcgctcacttgacagaggattggctttttttctttataaatatttgacggcctcgacgataatcataatccaagagatgataaacgccacgccgccgagcggtgtaatcgcgccgagaacggaaatctgcgtcacgctcaatacgtacaggcttcccgaaaacagaacgatgcccgcaaacatcagccagcccgcaacagaaacactgcctgcgccagaaagcttttcggccaaaaacgcgacagccagaagaccgagcgcgtgatacatatgatattgcacgcctgtgtgccacacctgcaaatatttatcggggattttcccttcaagcccatgcgcgccgaaagcgcccagcgccacggccaataaagcgttaatcgcaccaagaataataaacactttcatctatttttctcccgccttttcgttaaagtttccaattcaatcataacccaacatcggcaaaattcaacgtccgccgtccgatgacacgagattgtcggattttttctttttgataagttggattcggtcaatcgctatcgccagcagcgtcccgagcacaagaccgttgcttaagagcgaaatcaggatcggatgcatccccgataacgcgctctccggcacaaacattacgccgacccccgtcaggagcgccagaccgataatggagcggattcgtttttgctccgctttctcataagagtcaaactccgtaaaggcgagaccggccatcgtggagaaaacgacgaagtttaccgcaaagccgaccggtgagggcagactcgcaaacgcattcataaatagcgggatcatactgatgatcacgacaaatacacttcccaaaagaaacggctttttcgaaggaagcttcgtcgtctcaataaaaccggccgcccctgaaatcggcacaggcgcaatgccccctgacagtccgctcaaaaggtggctgatcgaagccgcaaacccagccggacgctcacgccgcttcccgacggtgccgccgaattttttcaccgccgcttctacaacccggatgctcgcgagcatgttgacaatcaaaagcacggtaatgaagagtgatgtaataatcaggccgctgtcaaacacgggttttccaaacggaaaaagagccggcagctgaatcacgcggtccggtatttgaatcggtttggcagcgccgaagacgacgaataagatccatccgccggcaagcgaaaggagaatcgcatactgtcttaagaacgtaacattcgatcgggacatgatgaacatcgccgccgtcacaaccatggcgagcccgaatacaaggccgtcgacgctgttttttaaatagccaatgcccaaaaggcctttcacaatcggctgactcagctgcatgaccaacagcagcagatacacaccggtcacaaccggcgtaaacagcacggccagccgttcaatcactttaaaaaggctgaacaaaaagaaaaagacagcgcttaataacagcgccccctgcagcgcccgcagcgtctcgccgaatgtcgcgaacaccgtgccagtcagtccgccgtaaatcgtgtatacgccccaccataagcctgccgggctttcattaatcggcagacgatgtccctggagacattggatgaccgcggcgacgccaagcacaaaaaatgtgctctgaatcaatgcggcagaatcggcatggttcaagtgaaatgattgtgcgatggcgacaggaactacaatcgcagctgcaatcataaatgccgtccattgcaaacccccgagtatcagtttcaagtcaatcaacctctcctgttaaaaatcgaaaatggaatccccgtttccgtcttcctcacgttcgtctttcgcttttttctgatattggttcagcccggcgctgcccatcattttttcaagcagcagcgggtctgtcgaaggagacgcggaaggtttcggcgccgctttcggaatcggattctgcacaggcgccggagcggtgtgcgtctgagtgccgagcacgacatcacacagagagcggatggcggccgcgtgcattttgacctcctcggtgcgggtcgccgttttcgcctgcctcagttcttcttccatcttctgaatcaaagcagagatatgtatgttcatgagtaaatcctccagcggtaatttgtcttcttcctgcattttatcaaatttctgagcgaatcgcagaattgagtttgttattttttctgacggcataccgcccggaacgccaaaaaaggcgctttccgccgggcggaagcgcctcaaaaaaaccgtttattgcggcaggtcggggatgcaccaatcgatcggctgctcccccattttttcaagggcggcgtttgtacgggaaaacggtctgctcccgaaaaaaccgttccttgccgaaaacgggctcggatgagtcgattcaataataatgtgtttcgatgtgtcaatgcgctcttttttcatctgcgcgtgacgcccccataggataaagacaatcggcttctctctttcattcaccacatcaatgatgcggtcagtgagccgctcccatcccttgcctttgtgggaattggcctgaccgcggcgaaccgtaagcactgtgtttaacaaaagcactccctgcttcgcccagctgacgagcgatccgtggttcggtacggagcagccgatatcgtcctgaagctctatgaaaatatttttcaaagacggcggctgcctgaccccgggctgaacggaaaaactaagcccgtgcgcctgtcctggcccgtgatacgggtcctgtccgagaatgaccgcttttacatcctcatagggcgtataatgcaaggcgttaaaaatatcatggctgtcaggataaatcgtttggctgctgtattcttgtttcagcatttctctcagctcttgataatacggtttgtcaaattcatctttcagctgattccaccagctgtcttttaaaagctgcttcaaactgtccgtcccccttatgaactgtgcagtcttgaatggacgggctttccgtcccacacaatgtcagtcggcgcctcccgcctcttcatgtccggctcttcaagaagaaccgcgaagtttttcgtcgggagctccccaagcccgtgcttttcgcttaaccggtctaagtacctcttccgtttgccgccgagatccgcggactgattgccgcctccctcaaaaaacgcatatatgacgctcgcgcaaggaacacgcttcacacggtgctgttttgcggcgcgcaaataaaagtcccagtcccaataattatggacatccggatcaaaataccctaacgtgtcatgcagagaacgcctgtacatgctgcctgacggaacgtacgtggaaaatacccgcatatccgcataatccgccgtataggcgaaaggctttcgtgacaccgggtatctcgtgccgccccgttcttcaaatgacacaatttccgcgtcagaatggacaaaatccgcatcagcaagtgcagccgccattctttccaaatggcccggcgtaatgaaatcatcatcatcgcacagcatgatacaatcacccgacgcttttttcacacctgcgttccgagcttccacatgtccggcattctgttctaaatcaataatctgaatcggcagatcgctgtacagctgcttcgcttgttcgaccgattctccggcatcatttacaatgatcacttcataaggctttatggtctgcatggaaatcgactccagcagctcacacaaagccggaatccgattatacgtgactatgacaattgatatattcatgatccgctccttctgctttttctcatgttctattaaaacataaagcggcggagagatcaggggggatttttgatttcggcccattcagaaacaaatccaggtcatgcccgccagcaaaacgagaatgatcagaaggtctccccaaacagtgcagaccgccttggcattaagtctgcccgcctccatggcgttccaaagttttgattgataaacaggcaccaacaccatcgcatagcatgtgcacaagcagacaaaagccggcgggacaagcgcacatccatcctcattccaatcatgaataagttccggtatactcaccccgctgtcaatgtacaagtataatatacccgccagcggaatgagcgaactgatctgcagctcgaaaagttccaccttccactcacgcgcaaacgaaacggcccaaatccatcccagcgcataaaacaatagaagaagcaaaatactgaaaacaacaaaaatagcgtcttgcatcccattcagaaccataataaaaagacttacaacgggcaatgcaagaaccaagccgcagacggtaaatacggtaacggctatttgggcgcacgcgccgtacatccacgaacctaatctcattttaacacccctatatagattccctatgtacatagtgaaaaagatcaggcaagcctctgcctgcctgcgtaaaaacctattttgccgcaaaacggaaaacataccgtcacaacggcgcatactgccgcaaaactcggtgtgaccgccgaaggaaacagcccagccggaaccagattgaacaaaaagacaaacataaaacatagattcggcgccattgaagcccataccgtccgctcagcaagctttttgccgccagccccgaactctttgccagcttgatagccgatttggaaccaatacagcacataaccgatcataatcagccatactgacacggaaatccctttccacagcgcgtcaacagcgggatgaatcctccacgcgtgcatcatcgtaatcatcgcccccatcacaaaaagaccgcagttgcagaacagataaaagagcataaaagtccgcgcgggcaccgccgaagctttttgaaaagcagagataatctcagacggagtccccacttcccgcagaataagcgccatcgcttcgctttcggttttgcctttttccagatgatcacaaatggcatgatgaatatggctttcgatttcttttaataattcacggcttccggacttgccttccagcccttttctgatttcctgcacataaaggtctttatccattctgcccgccccgcttcagcatccggtccatcagagcagagaacagattccattccttcgtccgttcggctagaatgttttttccttcatcggtgatccggtaatattttcggtccggccctttggtctgcttttcccagtaagaagaaatatagctttggcgttcaagcttatgaagcgatgggtacagcgtgccttccttcatttgcagttcattcccgcttcttttctccatttctttcacaagttcatacccgtacatgggccgttcattcagcagcgtcagcaccagaatgaccgtgcttccctttacaagctccctgttgagcatttattttctcacccttacctagtaatcttatgtaggtattgtacgcacatcccccgcggctgtcaaatcattcctctaagccttccgtattgtgatcggaagaaaatctaactataatgagatataaaacactgatggaggccattgatatgtcaatgcacaaagcacttactattgccggttctgattccagcggcggcgcgggaattcaggccgatttaaaaacatttcaagaaaaaaacgtatacggaatgacggctttgaccgtgatcgtagcgatggacccggagaacagctgggatcatcaagtatttccgatcgatgccgatacgattcgcgcacagctggcgacgattgttgacggaatcggcgtagacgccatgaaaacgggaatgctccctaccgtggagatcatagagcttgcggcgaaaacgattaaagaaaaacagctgaagaatgtcgttatcgatcctgtcatggtctgcaaaggagcgaacgaagtgctgtatccggagcatgccgaagcgcttcgcacccaattggcgcctctggcaaccgtcatcacgccaaacctgtttgaagcaagccagctgagcggtatggatgaattaaaaacggtggaagacatgacagaagcggccaagaaaattcacgaactcggcgcgaaatatgtattgattacaggcggaggcaaattgaaacatgaaaaagcgatcgacgtgctgtatgacggagaaaccacggaagtattagaaagcgaaatgattgatacaccttacacgcacggagccggatgcacattctccgccgccgtgacggcagaactggccaaaggcgctgaagtgaaggaagccatctatgcggcaaaagaatttatcaccgcggcaatcaaagaatccttcccgctgaaccaatacatcggaccgactaaacattcggcgatgcgtcttagcggaaaataaaataaatatccccctcattacccgagggggattatttcatttttttcgcggatgaccgcaaaaacatctcaatagactgcacaaacagcgcatattccttcatctgttcatatgtatgcatcagccgatcactccattcattgtgcggctcagctctcttgagcatgcgattcagctgaagcaatacttctttatattcttcccgcttatcttccacttgctctgcggctttgacaagtaaacatttcggcgtcatcttctgatttttcaaaactgagaaaacaactccttttattcctggaatcataggctttcgtttgaagaatagcacagatggcataggtttcacataagaaaaaagaacgattttctacaaaagtgtccaaattgagccatttatttccgtttttcctgccgaagtgacggttacgtcatcatttcccgggaaaggaaaatatctggcgctgaatacctcttctccatcattcaaaaacaattcaatcgaggatgcatccagaaagagctgcacggaatgcacctcgctgatggcgcagcttctcttttctttttcttctccgctgaaagcggtgcgctccagcacagccagcccctcttcctgatgaaatataaaccgggccgccccccgaattgagatttcaaaaccggattcgcaagtgatgtcctccagcagcacttcagcccgggacgcatctttcaccggcaggcttacagacgagcaattcaattgaagacggtgcttttgttcatccgtgcggcgtgatttcatttccgaaagcgggcgctgtatgattctgccgttggacagtgacagctgtctcggcatcgttaagcagtgaatccagtgatacgcatgggtcggatgtttgtcctcatgctgatccggaacgcccatccacgcgaacagaattctccgtcccttatcatcttccagcgtctgcgccgcgtaaaaatcaaatcctctgtcaagctccgtaaattcaccgtgcttaaattctggcggctctgtatgcagcctgccgaggaaatagcccgcctggtggctgttatgatattctatcccgtcggcttcaagcccctgcggacatacgagcagcacgtcggttccgtcaagggaaaacaggtcgggacattcccacatatagccgaatgacccgagaccgccggagtccgcccccgcaatcgcaccgagaaacgtccaatccgtcaagttctctgatgtgaacaacacaacgcttccggtgagcttttctgtctgcgcgccaagcaccatgtaatacgctccgtctttcttccaaaccttcggatcacggaaatgagcggtatagcctgccgggagacgcgcgacaactccttttttttcaaatacgatcccgtcttcggatacggcgaggcattgatacgtttcccgattgccttctccgtcacggacattgcctgtgtacatcaggcagagccgcccgtctttttcgatggcgcttccggaataacagccgtttttgtcataccactcacccggcgcaagcgcgatttcttcctctttccactcaacgaaatccttcgtcgtcacatgcgcccaaaatttcgcgccatgccccgtatgaaatggctgccattgaaaaaacaagtgatatacgccgttccattggatcacgccgttcggatcatttaaaagcccgaccggcgccataatatgatagttctggcggtatggatctgacgcggctgtttctccccgcttctttttcgcttcctcagcctgcaggcgcagctcttgatccggtgtcctcatttgacggcctccttttctttagctcccataatgtaagcggcaataaacgccgagacagaggcgatgcccattccgatcagatagtttataagatttcctaaaccgagcggagccgtgatggcaatcatcggaattccggtcagaccgtaggcattggcggcgacgccggtcaccacgacataggctcctcccagcgctccgccaatcattcccgcgataaacggcttacggtaccttaggttcacaccgaaaatgactggttcggttacaccgagaaaagcggaaaatgcggccggcagagcgatttctttcattttcgcttttttcgtcaggaaaaatacagccagtcccgccgcaccctgagcgacattcgccatcgaccagataggaaggatatagtttctgcccaaatcagcgatgaggccggcctcaatcgcatgaaagctgtgatgcacaccggtaagcacaataagcggataaagaccgccgaaaagcagtccggcaacaattcccgcatgatcatacacatatgtcagcgagacggtaatgcctgatccgatcgccctgccaagcggaccgattgcgataaaggtaataaatcctgtgacaatcaccgtgacaaacggcgtgaccaataaatcgaatgcgtgaggcacaatttttctcgtgcccttttccactttgctcataatgtaaacggctaacagtacggggatgaccgtcccttgatagccgagcagcgcaatgtcgaagccgaagagctgcataaaatcaggcgatgcatccgcaagcccccacggattcaaaagcgccggatggatcataattccccccagcacggcaccgagataggcattaccgccaaattccttcgccgcgctgaacccgatgaatacgggcaggaagataaacgccgcgcttgaaaacatgtctaaaagcttaaacagcgatgattgttcagacacccagtgaaaagccttcatcatgccgagcagccccattaaaagtccgcttgccacgatagccggaatgatgggaacgaatatgttagacagtgtcttcgcaaatcttgcggccggattcagcttttttttcgctgcgtcctgatgtgtctcacgatcttcccgccccaaatcggcttcttttgaaaaagcgtcatacactttattcacgaggccggtgccgaatataatctgatattgccccgagctgctgaaagccccttttacgccttctatttcttcaatgccggcctggctgatcttctgttcatcttgaatgacgagcctgagccgcgtcgcgcaatgtgtcgcgctgatgacatttgattcccctccgatatgcttgataagctgttttgccgtttcttgataattcatgatgtatccccctttctaaaatcaaaaaagacctaaaattcgccaacgaaaaaggtcagcatgatccctttttcatgtacgcaaattttaggtcttgcctgcattaccagtcacaatcccgccggattcagtttttttaatgcgctttcattctatttcatgatagcgctttcgtcaatatgttttcaaaaaaaaagtctgtttctcgaaacagacgcgttattccgggtttttttgcagacgctggacatgcagcgtaatatagccggcctcggattccggcagttccaaatcatattcattttttaaaaacgccgccagttcaagcgcacaccgataagcaaacggatactttttttggatgaaataaagcatctcctcgtccatggaatggagtgcttcatttgagtccaaccggctgaccgcataccgtaagtgcgtgacgaggcgctgataggaaatactgtcttcatccaccttctgttcgaaaaaggattcgatcttttcgatcatttctttgatcatggttgtatgcttcatcgccgaatacatgcttttggcatccgccttggcagtgtggatatgaagcgcgatataccccgcctcatcatcaggcaatgatataccgagggtttgtttcacgtgttcaaccgcccagcggccgatctcatattcttttttataaagcgccttaatttcatgaagcaatcggttatgcacctgaaggccgttttgaatcctttcgatcgcaaaggataaatggtccgccagcgcaatgtggatgtgatcgctcaaaggtgccgcaagctctccctccgcatggctgatgatatcttcagccgcctctatatgctcttcgggaagcgtttctaacacttgtttgaacttttcattttcgtcgtgcacgacaaatattttttcaattttatgtttttgaatcacatcattttttctcttttgaaaagcgattccgggacccattacgatcttttcccgtccgtcttcttttattaacgccgcattgttatttaatactttgtctattctcaagaggttcgctcccgttcatatgtttagtgggattgtaccctctttttcatatgatgtaaaggtgccggacccgcgcgctcccgtttcggcaattctttgcggacaggcatccatcggtttttatccagcctgccgcgggccgatttcgtttcatcggtcaaatccgccgatcggacacggctcacaaacgaaaaagccccagccgtccgcttcgctttcttataataagccgcttggtttccgtacacggcagctaatggatatcttccgttacccggcgccatccagttcatcagaaagaccatccacacccgtaaagatactagcaaacgtttcattgcaaatcatccctccgcttctttttgacagacagcttgttcgcaggcctgtttttctctccgctttaacggaaaaggcggccgatccttctccgctaaaaactagcgggtctagcaaccctatgactctatgatagacgcggccgggcgaattgtttgtcacaatatgagtgaaaaaacaaactagttttcagaagttttgttgaaagctgatggaaatgacctgaaaaatggaaaagccgataaaaaaagttatacacaccttatcccttggttaagcacagcttaaacacagggtatatccacatatccacaaactcgatctatattttgtataagaacactcgttcccaacaatatatatacacaaatttattcagttatacacaggattctgtgtataactccctccttattcacagaccaatttccataaatgagtcatatgtcacaaggattattttgaattttcaagaaatatatactagatttctaatttagataaagaaaaagggggaaacacgattgaaaaaaggaatcatccgttatctgcttccggcttttgtcttatcctttaccttatccacaagttcacaggctgcgccggcttcaaaaccgcaaactcctgatcttgagaaggctgaggtgttcggtgacattgatatgaccaccggcaaacaaacgacagtcatcgtggagctcaaggaaaagtcactggcggaagcaaaggaactcggcaaagcacagacaaaaagcaagctgaaaagcgaacgcgcaaaagtgaaaaagaaagcgctcaaaaccattaaacacggaaaaatcaacagggaatatgagcaagtgttttccggcttctccatgaaactcccggcaaatgaaatccccaaactgctgagtgatcaggatgtcaaagcggtttatccgaatgtcacctatcataccgatcagctcaaagataaagacatcaccctatctaaggatgccgtgtctccgcagatggatgacagcgcgccttatataggggcaaatgacgcgtggaagcttggctatacgggtaaaggcgtcaaggttgccattattgacaccggtgtcgaatataaacaccctgacttaaagaaaaatttcggacaatataaaggatacgattttgtggataacgactacgatcctgaagaaacgccgtccggtgatccgagaggcgcgtcgactgaccacggaacccatgtcgcgggcacggtagcggcaaacggaacgattaaaggcgtcgcgccggatgctacactccttgcctaccgtgtgctcggtccgggcggaagcggaacaacggagaacgtcatcgccggcatcgaacgcgccgtacaggacggagcggatgtcatgaacctttctctcggcaattctgtgaataacccagactgggcgacaagcacggcgcttgactgggcgatgtcagaaggcgtcacggccgttacatcaaacggaaacagcgggccgaacaattggaccgtcggctctccgggaacgtccagagaagccatctccgtcggagcgacccagctgccgctgaacgagtacgccgtctccttcggttcctattcctcagcgaaagtaatgggctacaacaaagaagatgacataaaagcactgaataaaaaagaaacagagctcatagaggcgggtatcggcgagcaaaaggattttgaaggcaaagatctgaagggaaaagtcgctgtcgtcaaacggggcagcatcgcctttgtggataaagcagacaacgccaaaaaagcgggcgcgatcggtatggttgtgtataacaatgccccgggagaaattgaagccaacgtaccgggcatgtccgtaccgacgattaagctttcatcagaagacggcgaaaaactcgtcagccaattaaaagcaggcggcacaaaagcgacattcaatttatccgtggctaaatcgctcactgaacaaatggcagacttttcgtcacgcggtccggttatggacacgtggatgattaaacctgacgtctccgctcccggcgtaaacatcgtcagcaccattccgacccatgatccggccgacccgtacggctacggatcgaagcagggaacgagcatggcttccccgcatgtagccggcgcagctgccgtcatcaagcaggccaaaccgaaatggagcccggaacaaataaaagcagctctcatgaacaccgcggaaaccttaacggacgcggacggtgacgtatacccgcataatgcgcaaggcgccggaagcatcagaatcatgaaggcgatcaaagcagactcccttgtcgccccgggaagttattcttacggaacgtttatgaaagacaaaggcaatgaaacgaaaaaagaaacctttacgattgaaaaccaatcgtccatcagaaaatcatatcagctcgagtactctttcaacggcacgggcattaccgtttcgggcacagaccgggtcgtgatccccgctcatcaaaccggaaaggtcaatgcgaaagtaaaggtcaatgccaaaaaagtaaaggcaggcacctatgagggaaccgtcacagtgcgtgaaggcggaaaaacagttgcaaaagtgccgacgctgctgattgtaaaagagccggactatccgcgcgtgacgtcaatcgacgtgcaggacggcacaacgcagggaacctaccaaattgaaacctatcttccggcgggagccgaagagcttgccttccttgtatatgacagcaatcttgactttgtcggccaagccggcatctacaaaaagcaggataaaggctatcaatatttcgactggaacggcaaagtcaatggtgacaccgcactgccggcaggagaatattatatgctggcctatgccgcgaacaaagggaaatcaagccaggtgctgactgaaaaaccttttatcattgaataaccgaacaaccctgctggagcatcagcagggtttctttctgatcattcggcaaaagcttcacgaagcagccggtatgactgaagtttatcttcaaagtgatgagtaatggtcacagccatcacttcttccgttccgtatgctttactgagagccagaatctgttctttcacttgttgcttcgttccgatgatcattcgattccgattatcggcaattcgtctttgttcatacggtgtgtacgtattgccgcggacggtttcgtaagacggtacgccgtgaagcggaatcccctgttcacccgcaagcagcgtataatccatgacggccgcgagttcctccgctttctcctccgtgtccgcgcacagcacaaacaccgccacggctgtttttggttcttttcctaatacagaaggtttaaatctgcgcttatattgtgctgtcgtgctttctccgccttctccattaataaagtgagcaaacatatagcctgctcccatttctgcgctcagaagcgcgctttcccccgaagaaccgagaagccagacttccggcgccgtcttaataaggggtgatgcggtcagattcggaaaacggtgattgtcgtcggctgcatcatgcaaatacatcgccagctcacgaagctgctgcggatattgatcagcgttacgcttcccaccgtcattcagcgcccatgatgcgatcggcattccgcccggcgctctccctaatccgagatcgattctgcccggcgtcaacccttcaagcacgcggaaattctccgccaccttatatgcgctgtaatgcggaagcatgacaccgcccgagcctacacgaatctcattcgttttcgccgcaatatggctgatcagcacttcagggcttgaacccgccaaccgctctgaaaaatgatgctctgacacccaaaacctcttatatccaagcttttctgcctcctgcgccagtcttactgtatcccgcagcgcgctttccgcggaactcccttctgatacaggagattgatctaatatgcttaatgaaatcatcactgtcacctcatcaacatcgtaccactgctaagccgttttttctttctgtatgcttataagcatccctgatgataaacatttatataccttgttccattttgtcgaaatatgttacacgtgaaacataaaaacctctcccggtcaggagagtttttttcttaattcttttgaaaacctttatcttttacatattgatttaaataggttctcggtttttgtttcatgaactgcaggatttgatcagaccatgtttcaacccgcttgccgtttgtccgtttatcataataagcggcaatggtttcatcatattccttcatataactgcggaagtgttcttcattcgtatcgtacgtgttttcatgatatacggcttgtttcggcaggcgcggcttttgaccggacggatgagcgggatgaccgactaccaagccgaacagcggcagcacatggtcaggtgtaccaagcacttccgtcacctgatcaagttcatttcgaatgcctccgatataacaaatgccaagtcccattgattccgcggcaacacttacgttttgtgcggcaagtgcggcatcaatgacgctgaccataaacatttctgtattctcaagaagctcggtaatgttttcgcctttttcctcagcaagttttttatgacggtacaaatcagcgcaaaacacaaacaagtgcccattattctcgacgtaaggctggtttccggccagtgccgccagcttccgctttttctccttatcagttacgccgatgatggagtaagcctgcacgtaactggacgttgacgccgcctgggcgcttttcactaatgtatctatctcttctgctgtcagaagctcgtcagtaaatgatcggatcgaccgatgattaagtatggtttcgatggtattgttcatataaaagcctccttctttctatatcatatccgaaagggaatcatgtcaaaagcgaaatgctctaaacaaaaaaagacagcccgaaaaacgagccgtctcacattaagaattgaacaagtagcttttatatttcgtcagctgcacacttgcgttatatacgatcccgaagctgattaatgtagaaagcaccgagctccccccatagctgacaaacagcagcggaataccggtaaccggcataatgccgatattcatcccgatgttctggaaggtgtgaatcacgataagtgcagtaaatcctacgcaaaaaaacgcgccaaatcggttaaacgcatgcaagcggtcaatcagcaccacaagcctgtaaattaaaaagaaaaacatgacaaccgcaatggcgcagcctaaaaatccaaaactttcacccaaaatcgcaaagataaagtcggtctgtccctcaggtacgtacaccttcagattatgaacgccgtttccggtaatgccgcccgatccgatcgccataacggcctgatccacctgccagcttttatcgctctctgcctgagtcgttgccgcactggagtcagacatccacgatgtaatccggttaatttgataatccgcaatgccgattgaattcgccacatggggaaattcaatcaccagcactaagaaaaggccaagcacaagcgcggccgaaccgccgatgatggtgatcagcttccagttcacacccgacataaacaccatcaccataacgataaacagacagatcgcacccgtaccggcatcctgcaaaacgatcatcccgatcggaataaccgtccatgccgcaattttcaaaagcagattcacatcttcccgaagtgacctttgatccttcgggcccgccttcgatataatggacgcgaccatcatcataattcctattttcgtgaactcagagggctggagggtaaagtttccgatttgaaaccagctcttcgctccgtttttaatcggcgcgatggattccggcgccacacgcaaaaggagcagcgacagcacgccggcaatcaatacgtacagactcagtttttcaagctgctctaaatcaaagtacagcaataatccgatgaatcccgcacctataacatagaagacaatctgtttcatccaggcactgcctccgtactgcccgaactgtccggccgcataaatcgctgcaacactaattattaaaaacacaccaaatataaaaatcaaatccccctgataatagggattttgctgtttcttatatcgactcattctatcccgccttacattttcatcggaagtcactattgtttattatacatgaacaccgttcaagaaaacatgatgaggttgcttcctttttattttttacggtttggggactacacgacatatgacgtgtcagaaaaggaaatgtttcggtcatgatgaaacttttccgataaaaaaccccttctcgtcagaaaaggggtttcagcctatgtttaacgtcataaacaagctgttcgggtcctctttataatgtgcaaacggatcacaatattgaaacccggctttttcatacaggcgtctggcggggagaaaagcctccatagaaccggtttctaagctgatccgctgatagccccgccgccttgcttcttcaagcatatggcggaggatccggttggcaacgccttttctgacatgatgcggagaggttttcattgatttgatctcaccgtgccggctgtttagctcctttaaggcaccgcagccgagcaggatgccgttttccctcgcactccaaaacgtaacgtcaggctgacgcagccggtccgcattgagcgcatgtatactttccggaggagaatgcatggtcatgctcttcagatgatcctgcaaaagcgcaaagacatccggcgctgtgacatcttctttccttacgtccacttcaaaccacccttgctgtgcatattttctttgaccatagcaaaggttcacagcctgcgccattccattgtccggaaatgtgacagggtatttggcctttccggtttcttgtacctatccaaaaatgaggcaatagttgcaatacttttctcgaaaaagcggtatcaaaaattggaaaacatggtataataattgtaacaaaatgttcaaaaaacgaccacaaaacagacacattttattctctgtatttcattttggaaacgctcccataaaatgaaaggagacatgtaagatggacatgttttttgcttatttactggtcgcaagcgcaacacccctctttatctggctggataacaaaaaagtcgctctttcggccataccgccaattattctcatgtgggttttcttctacttttacgcaaccagcagcctatcccctctcggccacacacttatgatcatcctgtttgccgtcaacgtcatcgttgcccatatcgccgcctttatcatttacggccttccgcgcctgcgccggagaagaagccaataaaggcacaaaaaaccctcttcgcataaacgaagagggtttctttttattcctgatgttcggaatgatgcttcgcaccgccaggagggtttccatccatatggtcgccgtgatggtagtgcgccgcaaagatccagatggaaccaaggatgataacaatcgctccgaaaaatccgaagagcgtgtttccgacttgaattccgccgttttcgctttctgtcatgtgcatgaacatgagaagctgaagaccggcttggataaatgcgaatccgaaaatgatccagagttttgctgatgggcttaattccgtatatactgcaacccaaagggccagcagggtcagaataatagacaacgcaaaacctacgatatgcttccacggaaagtggctgtgttcagcagatttgtttgccatattatagtccccccaatccgatgagatagacgcctgtaaagatgaagatccaaacaacgtctaagaagtgccagtataaacttgagataaagatttttgaagacgtctgcggcgttaatccgcgtttcttcaattgcagtaagatgccggcaatccagaagataccgatcgttacgtgcgttccgtgcgttcccagaaggacgaagaatccagaccagaaagcacttgtaccgagagatgctccttcatgtacatagtggatgaactcgttaagctcacatccgacgaagcccgcgccgagaaggagcgtaatgatcgtccaaatgacgacgccttttaaacttccgcgacgcatttcatgaacagcgatcccgcaggtgaaactgctgatcagaagcaggaatgtcatgatcatgacaagcttcacttcaaataattcagccggtaagactcctcctgctgttcttctttgaagaacgaagaaggttgcaaatagtgttgagaacaacacaatctctgcccctaaaaagatccaaaacccgagaatattgagtctgccggtttcagattgatattccataggcgcgttagaattgccgtgttctgcatgttccataaatcacgcctcctttattcggaaatctttctttccgtctcttttatttcttcaacaggtatatagtagccattgtcatattcaaatgaacgaagcaccatgcaaagcagaatgccgatcaaaccgacaatgcccatccagaaccattcaaatacaagtccgaagcctgcaataccgaacgccactgacataataagcggtcttccggagttgtgcggcatatggattttcttgaacttgctttccggatgaatatccgttttgtcttctttcaattgcaggtacgcatcttgagatttcacttcaggaagcaccgcaaagttgtaatgcggcggaatcgcagatgaagtcgcccactcaagcgtacgtcccacgccccatgaatctccgctgatctcgcgagtagagtagcggaagctgtagtagatgttgtagcaaaggattaagaatccgacacccatcatgaaggctccgacagttgaaataaagttcaatgcagtccatccgtcattcggtccgtaagtgtaaatacggcgaggcataccttgcagccccaagaagtattgagggaagaaacatacattaaatccgatcataaagatccagaagaaccattttccgattctttcgttcagcttgtggccgaacattttcggataccagaaaataaatcctgcgaaacatgcaaataccgtacccgcgatcagcacatagtggaagtgagatacgaggaagtacgtattatggtattgataatccgctgcagccatcgcaagcataacccctgttaccccgccgacaacgaagttcgggatgaacgcgagcgcccacagcatcggtgttgtaaaactgatccggcctttatacatcgtaaagagccagttaaagattttaaccccggtcggaaccgaaatcgccatcgttgtaatcgagaagaaagagttaacagacgcactgttccccattgtgaagaagtggtgagtccatacaaggaaactcaggacggaaatggcgataattgagccgaccatcgctttgtaaccgaataactgctttcttgcaaacgctgaaataatttcagagaaaataccgaatgccggtaagataacgatatatacttcagggtgtccccaaatccagaacaagttagcccaaagcatcggcataccgccggcttccagcgtgaaaaagtgagcgccgaacaaacggtcaaatgataacagcgccaatgccactgtcaaaacagggaaggcgaatacgataataaccattgtaatcagcgtcgtccatgtaaacatcggcatacgcatcagcgtcatgcctttcgtacgcattttcaggatcgtcaccataaagttgatacccgtcatcagcgtaccgataccggcaatctgaagaccgagcaggtagaagttctcaccaggcccgggactcatgtcgttgcttgccagcggcatgtaactcgtccagcctgcgttcggagaacctccgataacgaaagaaatattgaaaagcatcgcacctacgaagaacgtccagaaactcaggttgttcaagtaagggaatgctacgtcgcgcgcaccgatctgcaaaggtacgacaacgttgatcagaccgattaaaaacggcatcgccatgaagataatcatgatcgtaccgtgagtcgtaaagatctcattatagtggtttgagtctaaaaaactgttattaggaagcgctaactgggcgcgcatcatcaagccgtcgaccccgccgcggaacagcatgataacagcagagataatgtacatgattccaagtttcttatggtctacagacgtcagccattcagaccagagccatttccactttttgaagtatgtgagtacaacgatgatagcgatagtggaaagcgcaatggaaacttgtgcgcccagaattaatgggtcacctgttacaaaaaattcatcccatctcaatttcattcgggcttcctcctttcttgttcaatttcaatcttgtttatcgtcggatactttaaattcgtttttctttacattttcccacggatctgttttagagtgcggtgatacggctttgtagccaaggcgtttgcgcgcctccatcgcatattcggcatcttggccgtggtcaacgtattttaagtgtgtagaagagaacgttaatttaccgacattctccggaagcatcagttcgtcatacttctctttcgtcagctttggagaatcgctttgggcttttttcacccagctgttaaagtctttttgcgtaacagcttttacgttgaatttctggtcggcaaagtgttcgccggtgaagttcgcgttgcggccttcatatgttcccactttgtcagcctgtaagtattgatccatcagcattcccgccatcgcgtatttttgccccccaagctgaggaatccatagcgatgccattgaatcggctgaagaaattttaaataaaaccggacggtctacaggaatgttcaggtagttaaccgtctcaatatcctgctctgggtagctgaatacccatttccagtctaccgaagtagcataaacaacaagaggctctttatcctttgtcgcttcaggcgctttttctaacgaatatatcgtctgtacggtaggcacagaaagtgcaataacaattaaaattgggatcactgtccagactacttctaagaacgtgttgccgtgcatctcgggcttgtaatttccgctgtctttgcctttgcggtcgcggtacttcactaaaatgattgtaaatagtacgaaaacgacgccgacaatgaacagcataaatccgattgacaagagaatcagatctttctgctggtctgctacaggtcctttcggatctaaaacggaaatgtcgctgcatccgcccagtacgaaaacaacagccaacatcgctaataaaagtaacggtttaaatgctctgaacaagaagatcaccatccttcctattgatgtagtgaatctgaaatgtactttctcaaaatcttttctctatctaccttgttatgctatcaaaatctgcccttattagctttatttttttctaaagttcatctttttttcgacctaatgtcacaaaatcgtcaaaaaatgcatgaactttttccacttgcgcaaaccaaacataaaaagttttagatcatttagcatatatagagaaaaaagatagtgagaacgaataataccaaataaaggtttaccataataaaaaacgctggtcaacaaaaagattcattttgttaaacattctacaaaagaaatattttttcctttgttcacaccttttcacacggtttccattttaacgcaacgcattgtgaaaaaaaagaccggaacgcgccttgatatgttcattataaaaaacacattcatatgtttaatatggacaaaacgaaggaaacatataggcataaataataaaaaataggaagtgatatttatgggttttatcgtatctctgattgtcgctattattatcggctggatcggaagtttatttgtaaaaggcagtatgcccgggggaatcatcgggtcaatgatcgccggtctgatcggcgcatggatcgggcacggactgctcggcacatggggtcctcaccttgccggctttgccattattccggcaatcatcggagctgcgatcgtggtgttcttattcagcctgatcgccagaagcagaggataaaaaaaaagcctcgtcccttatgggatggggcttttttccggtagagcgcccaaatggcggataaaccgccggaaagccgctctgccttcttctgtttgtttaaagacgccggcatgctccagtatccgcgcaaaggcatggccgatttcctctttcagaatctgttccgcgttttctttcgttaccttccgcttatgcagcacactgagcgcccaatctttatgcgctgccgcagaagggtctgccgttaagaccgcttccgggtccggtgagcacagcgcttcagccgtgtatttcatttcttgttcaaggcggcccggcagaatcgcaagccccattacctcaatcagtccgatattttcttttttcaggtgatgaacttcctgatggggatgaaaaattcccagcggatgctcatcagaggtgcggttatttctgaggacgagatctaattcgaataaaccgtttctccgccgggcaatcggcgtaattgtattgtgcggtgtttctcctgaatgggcgaggagatcagccgcctcatcggaataaccgcgccacgcccgcatgatggcatccgccgcgccggaaagctcagacgcactctcgctttgcaggcggatgaccgacatcggccacttcacaattcccaacaccgttttcggatagtcaggcagcctgtaccggctttctgtctccgcccgcgccatcgggaattcataattgcccccctgaaaatggtcgtggcttaaaatactgccgccgacaatcggcagatcagcattggaaccgagaaaataatgaggatactggctgacgaacgacagcagccggtcaaacgtttttttgctgatcttcatcggttcgtgccggtctttcaaaacgatgcaatgctcccggtaatacacatacggagaaaattgcagaaaccactgctcatcgccgagaattaccggaatgacacgaaggttttgacgcgccgggtgatccggtctcccctcgtacccgacattttctttacaaagaacacatctcggataatcggattgaggctgctctttggcagcggcaattgctttcggatctttttccggttttgaaaggttgatcgtgatgtccagctttccgtaagccgtctcagccgtccacccggcattccgctttattctgtccgaacggatataatacacatcctctgaaaatcggtaaaacgcctttgtcgcctgctccggcccgtgcaccgcctttgtttcttcaaaacgacggacaatctcggacggctgcggggcaaagcagcccatgatcttcgcactcagcaggtcgcgataggtgtctgtatcggctgcaatccggcccgtttctgccgcccattcataaaccggggccaatatgtccggcaatgatgccgccgatacattttctttctgttctggaacctccggatgggtgatatgcaaagcttcatacaaacggtttctcgtatattcaatatcaagaaatgaaatcagctctttttgcaatccgtaccggattaaacgttccacgtgccgctcaattgccatcgtcatccccctttagttctctcgctccggctccgacatccgccgtgtaaaagtcagcttttctccctgtcttctcctcatagcgggcccctgccgtttcaataaaatccgaaaccgcatcgtccttgacgatactgactgtacagccgccgaaaccggctcccgtcatccttgatccgatcaccccgccgtggcgccaggccgcttcagccagtgtatccagctcatgactcgtcacctcgtagtcatcgcgtaaagagagatgcgaatccctcattaattcaccgatatgatgaagctgattgttactgaacatgtcggcggcctctattgtgcggtgattttcatagacggcgtgtttcgcccggcgtctgttcacttcattctgaatcagctccgcatgggcgtcaaaagcggaaggggtcagctctcccagtgattgaacggaaagatgcttctgaagatcacaaagcgcttccccgcactccttgagcctcgtattatagcctgagtctgcaagcgttcgttttttattggtatttgcaataacgatcgacagccccgacagcccgagttttgtatattcaaagctgagcgtcccgcaattcagcagaatcgcatgatgtttctttcccattccgatggcgaattgatccattattccgcagctgacgccgataaaggaattttccgccgtctgagcgagcttcaccaagtcgagcatatccgcctcaagctcatggcattccttgagaatgaccgccttaacaagttcaatcgaagccgaagatgacagccccgctccgttcgggatatttccccagaacacaatatcgaagccgtgcggaagggaaaaaccgctgccgagacactctgccatgacccctttcggataattggcccacccgtcctctttttgataacggatattatcgagactgcattcctttatgcccgcatctttaaaatgatgagagtacattctgacgagcctgtcccctctctcccggacggctgcatatgtaccgatcgtcagtgcgcaaggaaagacgtggcccccgttataatccgtatgctctccgatgagattcactctgccgggcgcaaagaaaatgcgcaggtcctccgattccccgaatacatcagcaaacgctttctttattttgtgcttcatacgcatcccctttcactattacactttcccccggggcgcggaaagaaaccgttatgacacgccctcttctttcgcttttctgaagacaatccacttgctggccgcatagttgacgactacgataatgacgttatcggcgattttcgccaacgtttcgttcatatgaaattgactgaccagaagaatcatcatggcgagatcgatggctagagacaatacccgcacgctgaaaaaggccgtcaattctttcatcagactccgcatccccgcggtcttttgctgaaatacatacagtttattcgtgacatatgcaaatagaacggacagaacccaagcagcgacagtcgccgccttgtaatccatctcaaatgccgacgtcagaaagtaaaaactggcgatattcacgatggtcgtgaatatccccataatgatatacatcataatttctctgtagcgcatggcagttcctcgctttctgaaagacttttctaaaccttttgtcaaatcaagaagaacgttaccctgattttctgccgctgacaaaaacatagagcgcgtcaaacatgctgcggaaagtaaccggccttcccagcacattggattgcttaatcatcccgtcgatgagcgcgcacatcatgttagcggtatgctcggtatctatatggtcttctattaaatttctcgatttgagccaatttatgtacatggtgctttcttctatccataacttataaagacggatataagcttcatattcactgacgactttgtaagtaggcatatgaacggcaaaagacacaacattccaggcaggcttgctgtttacaaaccgcatcagcaggctggccgcgcttgccgcagcttcacaaagcgtcaacggccgcgctttttgcttttctaattcatcgagatagccggtgatgatcctttttttaatctgacgcctgtctaataaatgcttcagaaaatcttccttgctttcaaaatgaacgtaaaacgcgcctttgctgaaacccgccgctttactgatgtcatcgattgagactgaatcgtaagctctttcaatcaggagatgaaggcctgcgtcaataaaactttcaaatgtttcttctctcttaatttgaaatttgttttttttcattttttaccccagctgtttgatcattcactttatcttacaccgaatcattcttttgcggtattttttatacaaaaagaatatgctagtcgacgctttgagggtaaatgttaataggtcatatgatttatttttatttgcatactatccagtcagtatttatttgtttattattatacgtaagaattcttgaaggattttggttatttcagtcattttcttagggaataggtaggtgaattcatcttcaatttgggattaccggccaactatgtgtgatatttgttatacattggctgctgtagctgggcaaatcaatttttcaattggaggttcttatgaaaactcatgtaatgaaagatatagatcaagattggcaattgttaattcaagaggctagaatcatgggtttgcacattgacgatgtgaggcgcttcttaaatactgaaaaagcggtgaagaaaaaaacaccaatgaaaaacaccatccgccagcggtaagattacaggcggatccttttactatatgacctgccacagtccgcccgcacccgagttttcaaaggaacagccgcaataagaggggaatcagagaacaaaccgtataccggacaaccattcccgtccgcattccgcaattgaacagccaaacatggtgatatgagatccccccgctgcatatcttgtgtatatgcccatttatgaggtgatacacagatggatacgaatccctattatgatgaaaaacaacagaactactacgaaggcctgaatccttatttattgaacaaaatagacgaaaactggcggacagtgcttgatgtcggctgcggcacaggcaatttaggagcggcgatcgaagaccgcggaataacggtttacggcattgaagcgtatcccgaagccgcaaaaaaggcggaaagcaaattgagccacgtgctttgcggcgacattgaatccgccattcttccgtacgaatcagaacaattcgactgcatgctgttcggagacgttcttgagcatcttatcgatccgtggtccgtgctgaaaaagcttcgtccttatgtaaaaaaagacggcacggtgcttgcatgcataccgaatgtcggccacatctcagtggtgctggagcttttagccggcaaatggacttacagtgacgccggattaatggatcagacccacctgcgttttttcacccgcgaagagacgctttcattatttaaatccgccggctatgaggtgaaacgcattgaggcgatccgcgttgatcacccctcttatcacaaagccatcgcatcattgcacgaagtatgcgtacagcttggcataaggcatgactttatggcagaagcatcggcgtatcaatatgtgattgaggccgagaggagcatgtaatggattcacattcatttctgtttgtcgtctgtgtgaatgacgagccgctgtactcccggtgcaaaagccatatcatgcagcttaccgtcccccctgcatactccgttgatatcatgccgatatacgattcagcaagcatggcctcgtcctacaacaaagcgctgagacacccctccaaatataaaatttatctgcatcaggatacctttatcattcatcagcatttccttcatgacatgcttcatatctttcaatctcatcaggagctcggccttctcggtgtcgccggctgcaaaaccctgccgccgaacggcatttggtgggaaagcggagagcggatgggaaaagtgattgaataccgggggaatgcttatcacccgctggactttgagcacggcgatgaagacggcctgtttacgcccgctgacgccattgacggcttgttaatggcggctcaatatgacgtggagtggcgggaggatttgtttcgcggctttcatttttacgacacatcacagtcgcttgaatttcaaaaacacggctatcaagtcggcgtcgcctgccagaaagacccttggtgccttcatttttgcggcgactcatttgacgccgcggcatatgaagcggacagacaaacatttgtcaaacactatatggcaaagccctctcgctgatcgagagggcttttttcgggttaacgtttattcagttcccgctcaatgatttgttcaaaggtttcctttcccgccgcgccagggattctctcatcgccgatgataaacgtcggcactgccgtaatgccggcttcctcataagcatggcggagcgcttcccgctgtacgtgtctgtacgctcttgtctcaagcgcctctttgaaggcagcgccgtcaagtccggcttcttccgcaagctttgtcagcacgccaacgtcaccgatattttgctcttcctgaaagaacgcctgaaaaacgcgtgtatggtattcgcttcctttcccatgttcctttgcgaaatgaaagccttcaaatgccaaatccgtgtaaggatgcggtgacacgcgggggaacgtgatttcaacgcctaaagactgcgccatcggctcaatggagtttttccacatctgccgcttggcgggatcattcaccggatcaagtttcggcgaggggctcggacgcaattcaaacggcttccattccacctgtacgtccttgtccttgattgcttcttcaaacgccgctttgccgacaaagcaaaacggacatacataatcagaatatactttaatctgcagtgtcattgtaagtctcctttccttttcattttaagttgtaacatatatagttacaagtgtttttttaaaaacaccctccatatggaaggtgtcacgattccagcagcctttgggcgatatattctccttttttacagccgccgggacaggcgaataaggaagagccgatcgtttgtgtatattcattcagcgcatcctttgccgccaaagccttcagcatcgggacaaattggcggtccgggtctttttgaaagcagataaacagcaggcctgcgtcaacatagcccgtctttggatcaattccgtccgtataggaaaatgcccggcgcataatctgtctgccggttgattttgccacgctgacatgcgagtcggcgggaatttgattcagcttcacgggatcggtttcctttttttgtccgaaaggcgcgcccgagcttttcacccgcccgaacgtgtgctcttgttccttcaaggatgaacggtcccatatatctaaaaacatcttaattttcctaaacgccatgtacgtgccgcccgtcatccagtccggctctcctgattgaacccaaacgatcgaattcatcaggttttcatcctttgtgctttggttgccggtgccgtctttgaatccgaagaggttgcgcggcgtttccccgtttttcccgccgcttaagaaacctttattgagaaaacggacttcgcatacgcctgctgcctgtttcatcaggttgcgcaccgcgtgaaacgccgtttgttcattatccgcgcagacttgtatgacgatatcaccgccgccttgattcttatcgagcttgtcgttaggcatcggcggaatatcggcgaggtgcttcggttttttatctttcagtccgaatcggtccttcccgtctttctcgaaaaacccggggccgaagccgaaggtaacggtcaaattcgccggggccagatcttgcgactccccggtatcctgcggaggcatatatttatttttctgttcgcccgacgggacggcgcctgaagtcagcagctgcgtcaggcttgtccattgtttgaaaagggagatgacatcggctttgtcgcttgacatgacatcaagcgccgcaaaatacacatacgtctgatgtgccgttgtgattcccgcttggtgctttccgtaaaaaggaacgatttgatcacgatcacgtttttcatcattcttctttgaagcggtggccgccggtttgaagagcggcgcgagtcctccgaggccgctcgctccgacagcgacggcggcgcccgcgacggcgccccacttcaggacatcccgtctgtggatctgtttttccttgttttgttcatcgctcatgctgcgtcttaactccttttaaagcacatcggcaatcttcgacatggtttcagaaagagccgtcagcttcgtgcttatctctctgatttgatctgtacttaatgtatcacaagacatatacgattgatcgcacgttttgtatttcgacatcaaaacttcaaattcgctgaattccgcatcaagtttttccgtgatctcgaaatggtctctccctgcgagcttttcactgtttcgtagagggcttttaagccttcggcgccggcggtgattggttcaggcatcactttgagcgaagcgatagagccgtcaaacacttcggtcgatattgcaagctgattgccctgttcttgacatacggcttatattctccaagtccgtcactgcctttttgcgcacacagaaaaagggccgccctatcgggacagccctgctttggagcgccgaatttcctctgaaaacttccgcgccgccgcttttggatcttcggcttggctgatggcgctgatcatgctgacgccgtctgcacccgcttcaatgacgggcgccgcgttgtcagccgtaatgccgccgattcctacaatcggaatggtgatgccctgacgccgcacctcttcaatcaatgtaacgccctgcacggcttcagcatctttttttgtttcggtcggatagaccgggcccattccgacgtaatcggctccggcttcttccgcccgcttcacctcggagacgttatgtgctgacacaccgagtatcatatcgccgattgccgctctcgttttttcggcgtctgcgtcatcctgcccgatatgcactccgtccgccttaaggcgcaaggccaattcgacatcatcattaatgatgaaaggaatcccggcctgcctgcagacatcctgcacctgcttcgcgaacaggagacgttcatcccctgttaaagaaccgctccccttttcccgaaattgaaaaagcgtagcgccgccctcaatggcttttttcaccacagaaacggggtctgcgcttgtattgtttgatcccataataaaataaaccgataacatatccttcatcatttcccgagaaatacgcgtcatttttctgtcaccctttcaattgcggcaagctcggccgcttcttgttctgagatgcttgccagcttgtttaaaagctcaatctggaagctgcccggccccttatgggaggtgtccagagcggcaagctgagcagcgcttccgtatacagaaacggctgaaacggccgcttgcagaacgtcctgccccgctgcgcagaaggctccgattacagacgtcagcaggcatcccgcccccgtcaccttcgtcagcagtttatcaccgttatgtacggcgtatgtgtcggtgccgtcggagatgacgtcggtttttccggtaatcgcaatgaccgtcttcagcccgcttgcagccgtcttagcgagctgaaccacatctcctccggcttcccccgcatccacgccttttatcttccaatcaggggcgccggctatattggcgatttccgcggcatttccgcgaatgacggacaagcggacctcctgtatgatcttgcgggctgatgccgtccgaaacggcgtggcgccggcgcctaccggatcaaaaatgaccggaacgccgttttcattggccgattttccggctgcgatcatagcttcaaccgacgccgaactgagggtgcctatattcaggacgagcgctcctgcgattttcgccatgtcggctgcctcctcaattgcataagccataacgggcgatgcgccgagcgcgagcagtccgttagcggtgaagttcgtgacgacattattggtgatactgtgaacgagcgggttttgatcccgcactttactcaagtgttgagctgcggtttgtgcgtccatgcttaatcatccttttttctctttttcggattccataaatacgatttcgtatgctccagccaggctctggcggcaaaggacatatagcggtctttccgccaaatgatggctaaatgccacggaatgaccggatgaacgagcggaatggttctgactttgtcaggatcaagaccgcggcagattctttccggcaagaggccgataccgagattggcggataccatttcgctgataaagtcccactgtgacgtttcataaatgacgtgaggcctgaatccggctttcacgcattccgtcataattcgattatgaaggacaaaatcctccctgaaaaatatgaacggctcttcttttaattcgtgaagactgcattctatctcgtcagcgagccgatgtgacggatggacgacgagcataagggtttccttgacgattgtgaacgtatgaaaaatctcttcatttgcgggaagcacgacgaccccgatatcaagcgagccgtcctccaccccttgctgcactttaatagagccgtcctcaacaagctgaaacgtcacatcgggatatgtgacgcggaagtcaccgagcactctcgggaaaaagccggacccgatcatcggcggaagaccgatgcggacgtgccctttcttcacttccataatatcgttcagctctgacgtcaggttttggaatgactttgtgatttcctgcgcctgcacatacatgctctgcccggcgtcagtcagttcaacttgccggccattgcggtaaaacagcttaatgccgagctccgtctccaggtttttaatcatttttgagattgtcggctgtgaaacatacagcgactgtgaagccttcgtaaagcttttcaaacgggccacttccaaaaaatacgttaagtgccggatatccattacatttcatcctttctatagacaaaaggaatacacattattctttatatgtattttacctatagcaaaaccttctgtacaatataaatataagggaggcatcattatgaaaaaattgctgcttaccgttattcaaatcgctctgctgtttatatttgcgcgtctgatcaattgggtcacggcggctcttcatataaatattcccggcagtataatcgggattgtgattcttttcacattattgcatttcaagattatcaaacttgaatggattgagcttggcgcagcatggctcctcggtgagctgctgctgtttttcatcccgtctgccgtcggagtgattgaatacggagatattatgtctaaattcggcgtaagcattttacttgtcgtcgtcatcagcacatttgtcgtgatggtttcaacaggtacgcttacacagctgatagcaaaaagaaaggagaaaaaacaaacgtgttcatcggaatcataagtttattcttaactgtcttagtatatttgggcgcgaaaaaactctacactcgttttccgcgggtgtatacgtcgccgcttctgattacgcccgctgttttggtcgtactgctgcttcttgtcaatgtcccgtatcagacatacaatctcggcggcggactgctgaccgatatgcttcagccggcaacagtggcgttcgccatcccgctttataaatatttcccgattttaaagaaatacgccgtggaaattattttgaacgtagcggtcggttcatgtatcgccattctgtcaacggcctttatcgcgaaatggttccatctcggcagcagcttagtcgacagtctcgtgccgcgatccgtgacgacgccgattgccatgaacgtttcagaaatgatcggcgggatgccggccgttacagcggttttcgtcattttaacggctttattgggaacgatcatcggaccgatggtcatccgctatttccgcattgataacgaaattgcccggggcgtgctgctcggaactagcgcgcacggagcgggaacatccaaagcatttgagctcagctccgtatcaggaacgatctcaagcgtgtccatgattctcgccgcaattatgacgctgtgcgcggccccgattttgctttcgtttatgtcataaaagactgctccttacagagcggtctttttttatttgccactcagatggatttgtctgtccttcataaaaagacgaaaacacgatatgataagatatgaagtgaaaagaatgaagaacggatgtgtcatatgaacggccagcagcgaagcagcatcagaaaaggacttgaagtcgatatcgtcctgaaagccgatcagcgttcaggaaagctgacaagaggaatcgtgaaggatattttgacgaactcaagcttccacccgcgcggcattaaggtccgccttgaagacggacgaatcggccgggtgcagcacattattgaatagaaaaaagccggagcttcagggactgaccccataatatgagacaaacaaaaaacaccttcaagtttgaaaacggatcgttgttatccgaaattagacttggaggtgttttttctatggggacaagagtgagttatccggttgaagcgaaacagaaggctgtagaaatgagattggcaggcgtacctatgaaagagatcatgcaggagttgaatattaagaataagacacaggttcagacatgggttagatggtataaggctggtgatacacatcgattcgaacagcctgttggaaagcaatacacttacggaaaaggtccggagtattcttccgatttagagaaactgcaggcagagattcgttacctgagacaacagaatgaagttttaaaaaagtacaacgaattggaaaggaagttgatagcgaaacgtcagtcgaacttgtagaaatattgcacagcacaatgaccgtacaggatatctgtattcatttaggtatctctcgagcgtcttattatcgttggaagaagaatctgatgaaggatcatcccaagcgccatttggaaaaacaaatcggcacgttgtgccgagagcacaagtatcgatatggatatcgaaaaatcacagccatactaaaaaagagaatgtgtattaaccataaaacggttcagcgcattatgcagaaaaatcaatggcagtgtcgggttaaggtgaaaaagcgcaagaaggatgggcagccatatgccgtggtccggttcagcgcattatgcagaaaaatcaatggcagtgtcgggttaaggtgaaaaagcgcaagaaggatgggcagccatatgccgtggtcgataatatattggatcggaactttcagtctgatcgtcctctggaaaagctagtaacggatatcacatatttgccttatgggcagaaacaattgtatctttccagtatattggatttatacaatggagaagtgattgcttttacgattggcgatagacaggacacagactttgtcttacacacacttgatcagctgcccgcactgccagagaactgtgtgttacatagtgaccaaggttctgtttatacatcttatgagtatcagaaagctgttaaaacaaaaggcattaccatgagcatgtcccgcaaagggacgcccgctgataatgcctccatcgaatcgtttcattcctcactaaagtctgaaacgttctacctcgacaggttggaaagcactacgacgaccatcgtagaacaaactgtcgaaacctatatacactattataacaacattcgtattcaaacgaaactaaacaaccagccgccggtcacataccgacagctggctgcttaaaggtgttttgatccctgtctcaaaaacgggggtcagtccctcgtttcagaggttttttgtttaaagatcggcaaattacataaggtaatgaaaaatctttctaaaaagacctttaaaaattctcccaatatcattagaataattacgtactacatttgagaggcagaaggaactatcttatgaaattaaaactgaagaaattcatacagatcttgtcgccagcacagctgattgcattatattattttcttgctgtgacggtggcatttattttgctaagtctgccggccgcccacaaacaaggggccagctggtcgtttatagacgcgctgtttacggctgtcagctcagtcagtgtcaccggtttaacggtcgtcaacacggctgatacattcagcacggccgggattgtcattttggctttcgtgcttcaattcggcggaatcggcatcatgacgctcggaacattcgtctggctcattatgggcaaacggatcggtctgcgggaacggaagctcataatggtggatcagaatcaatcgcagttttccggtatcgtcaacctgatgaagcaagtgctgtttttgattttattaatcgagtttttaggcggcatcatcttaggaacatattttttaacgtattatgattcgtttgaacaggcgtacttgcacggattctttgcgagcgtcagcgccacgacaaacggcggttttgatattacgggaaattcactcgtcccgttcagacatgactatttcgtgcagtttattacgatgcttctgattattttcggtgcgatcggttttccggtgctcgtagaagtaaaagactttttgttttcaaaacagcgcagatactcattcacgctgtttacgaaaattacgaccgttacgttcggaatgctcgttttgttcggagccgtgggcatttacgcgcttgaagcaagcaatgtcatgaaggggaaaagctggcatgatgttttatttttatgtctctttcaatcaaccgctacgcgaagcggcgggcttgcgacaattgatatcagccagctgtcggcgccgacattatttttcatctgtgccctcatgtttatcggcgcatcaccgagctcggtcggcggcggaatccgtacgacgacgtttgcgcttaaccttcttgccctgtttcattttgcccgggggaataaagcggtcaaggtctttaaacgcgagcttcaccaggctgatgtcatgaagtcgctggtcgttacgatgatggcgattctgctcgtgttcggatcgacgctgattctggccgtgaccgagaaaaatcagacgctcctcggactgctttttgaagtgtgttccgcattcggaacgaccggcctgtcgcttgggattactccgcatttaagcgacatcggaaaatgcgtcatcatgattgtcatgtttatcggccggatcggcattttgacgttcctttatctgatcggccgaaaagaaatcgaagcaaattatcactatccgaaggaaagaatgattatcggctgacaccgctttttagaaagcggtgttttttattgccgtaaaatggatgagtggaaacagtttctttggagattctacttgtaaagaggtgacgtcattgtttgccgtattttggaagtcggtagttatgatagcggtcggtacctttttattgcggattgccggacggaaatcaatcagccagctgtcggtgacccagacagtcatcatgatttcgatcggctcgattattattcagccgtttattgaacataatttatgggaaaccattttcgcggcggcgatttttattgcggtattaatcctgatggaatatttagaaatcaaatcaagcttttttgagtttttattttcaggaaaaaccgtcgctgttgtcagaaacggaaaaatcatcccggaaaatttaaaaaaaatgcgttttaccgaagctcagctgtcaatgaggatcaggcaggaaggcctcggagacattcaagattttaaatatgtgctgcttgagccgaacggacagatcggctatgaactcattgatgaggccaaaaacgtgacagtgcgtgacttaaaaaaaatgcttgatgaattcaaaacagatttgctgacagaaggaggaaatcaaatgaaacgcaaagcagcaaagaatgaagctttgaccaacaacaacacaccgactgagagcatggacaaagatgcatacaaaacacaatatgacggtgatcccggactgagaggcgcaaaccgcaaatcaaaacacggcaaacaaggaggcgagtaacatgacgaaaaaaaaccgccacagcaaagacatgcaaaaccataaaaagccgatggaccctaaattgcttgaagaagagtttgcaagcgagctcggtgattataacgccggaaaatggattgaaacgcttgaacagacgaagccaaagaaaaaagaagacggcaaacaataaaaaatacctcttaggcggcaacgcttaagaggtattttgcattatttcgaataagcactgtttcttgttcctttcaccgcttcaagccagccggtgatccgcagctcaataaacggctgtgcggccgttttcaccgcattgctggagagaatggacgtaagagcggccgttaaaattaagagcatgactaaattctgataatcagataagtgatcttcaagcccgatctgccgcagcgtttttataatgaatccatgcagcagatacacgtaaaacgttctcgtaccccatttcgtaaagaaataacgcttttgcggaacgagcgctaaaaagctgaaagtggcggcaaaggccaaaacataccagccgatgcgcgacagaccgctcaacagcgacactgtgccgaatgtagaataaggctccgatccgaacagccacgagtaatcaaaatcaatacaccagcataagaggaaaacaatccccagtacgcccgcggcaatctgcctgcctcttttagcccgaagcaaatcaaagtgctgcttctttaaataaaacccgacgagaaacatcggtagaaaaacaaacgtccgtgaaagactcagcgtgctgctgataaaatcaagatacccgatcatgacggcaagcccgcagctcgccccaagcgcccacattttcggcagcttcgtaaaggggtaaagcagcagattccaaaagaataagctgactaaaaaccagagagaccactgcggatcaatcggattgacgcttgccatgctttcatcctgaatcaaatagtaaaaaactgagtaaatgccctgaaaaatcaagtacggaataatcagcttcacagccagcttcttcacataacctttccgcttaaagttttttgcgaaatagccggaaaccaggataaaggccggcatatgaaaagtataaatgaatttgtagagatggagcataaactcatttccgttaataaatgaccggaggatatggccgaacaccaccagaaaaatcaagataaacttggcgttgtcaaagtaactgtctcgcgattttgtcatagcatcaccttctcttcaaaaatcatccactgcatgattatttcctgttggtgttcattttaaaataaaaaacaaaaaattgaaggaggacaaaagggattgttaggatgatgtaatggggaggtaaggatcgtagaaaaagactttaacttgtcatatcattgaaattttctgaaatgtatagggcgaatgaaggaagatgaggtattttgtagaaatattgaaggataggtttttgaagaaggagtgtactgaatggctgaaactctggatttgcaaacaaaagactcgctgaaagagcagctgaagcggatgaaagaggaaaatgaccgcctgaagagtgatttgaaccggtatcacgtgattatgaataacacgcttgatgccatttttatatgccgtaaggaaatgaaaatcgtccaggcgaacgaggctgcggcccggatgatgcagattgaggcagagagcctcattaaccgctcagtcctggattttttatattccgtgcctcaggaagaactgaataaggccgtgaaaaagtttttaaaaaaaggccatctgtggaaagaggtgccgattaagcttgacagcggcgcgacgaaatacattgaattcctcgccagagacggaattggagaggattatttttttgtggtgatgagggatatctcctctaaaaaaatattagagcgcgaattctccatgaacgagcagctgtttaaagatttgtttgacagggctgtcgacggcatcgtgctgtttgataaggacggcgggtttattgatgcgaacctctctttttgcaaaagctttgagatcggccagaatgaattgtcccatctgtcgctccgccattttaccgacggagaaaacaaaaagcatctgaaagaaatctgggaaaccctccgcagaaaaggaaacgccaaaggagaactgcccgtcaagcttcggtccggcgaagagaagctgtttgaatttacgattacgtccaacttaatcagcgggttctacatgtccattatgagagacataacagagaaacggttgatggaattgaaacttttcaaaagcgaagagcgattccgcgaaatttttgaaaacgccatggacgcgattgtcatttggtctgatgacggaaagattgccaaagcaaacgaatcggcgtgccgcattttcgaactgccgatggataagctggtggagacgaatttatgtacgtttatcgttgatccgcagaaaaaatataagcagattaagaaaaaatatgaaaaatacggggaaatccgtgaagaaatgctgtttcagatggcaaacggccaatttaaagagctggaattcacatcaaaacgaaccatacttgaaggtcagcatttaaccattttaagaaatgtcagcgatcgtaagcggatggaaaaagaattgcgggaaagcgagctgaaattcagaaaagtattcaacggctcaatggacggcaaggtcttatttgacaaccaattccgcattattgacgcgaatcctctcgcaagccgtatactcggtatgccggatgaggagctgagagcgtacaccgttccggatattctttctttatttgatattgaaaacgcgggtgttcccgccagaaagattgatttagaaggaatggataatgaaatccccttcctgttaagcagcagcgacagccgcaaactggaattctccttcaaaagaaatatcattcaaaatatgaatctggccatctttaaagatgtcacagaggccaaagagcttgaagagaggctgcggaaatccgacactcttcatgttgtaggggagctggcggcgggcatcgcccacgaaatcagaaacccgatgacggcgctgaaagggttcattcagcttcttcaaggaagcattgaaggcgaatattctctgtactttaacgtcattacctcagaattaaaacgcatcgagtctatcatcactgaatttttaattttagcgaaaccccaggcgatattatatgaagaaaaagacgtgacgcagattatgaaagacacggctgatcttttgaatgcccaggccaatcttgtcaatgtgcagatccatctgaacctgaccggaaacatcccgccgatttactgtgaaccgaatcaattaaaacaggtgtttatcaatattttaaaaaacgccattgaagtcatgccgggcggcggcaatatctacgtgaccattcagtcttctgatcaagaccacattttgatttctattcaagatgaaggaacaggcatttccgaagacaaattaaaacgtctgggtgaaccattttacacgacaaaagacaggggaacgggtctcggtctcatggtcagctataaaatcatcgaagaacatcagggacgcattcatgtggaaagtgaagaagggaagggcaccgtttttcatttgacgcttccggtccggcagaataccgaagaaagaaggagcggggaatgatctgttttacaagtgtgagagcgccgtttggaaccgtcatcgtaacagaggaagagagctttattaccggcctgtttctcaccggggaagattttgaggaatggcggaaagacgcgcccggcgtaaagccgtgcgaaaccgctttgctgtcggaggcgaaacagcagctggcatcatatttttcaggagaaagaaagcaattctctctgcctctgagacaaaaaggcacaccctttcaggaaagggtatggaacgcgctgacgatgattccttacggggaatcccgaagctacggcgatatggctgaagcgatcggaaaaccgaaagcggtgcgcgccatcggacaagccaataaacgaaaccggctgccgattttgatcccgtgccatcgggtaatcggcaaagacagcgccttaacgggatacgcgggcacgaagacggatgtaaaagcggtgctgctgaacatcgaacaaatatcctataaagaaaaataaagcgtatggcacgttccgttttttcgcgtccgacatatcattttattaagtgaaaaaagttggtctgatgaaaaaggaggacgaagcctgatgaaaatgagccgtccgcaaaagatagccggttatgcagagctgttttttaaaatgcatctcattacagccgtccaaaaagatgaagtgattacattgtgcagacaaaaaaaccgctgacattgcctgaggcaatatcatcagcggtttttcagcttagctggcagtcagcgaataattgttcaatttcttccgtgtaagagccggtcacaattcctttctcggttataatgccggaaatcaggctgcccggtgtgatgtcaaaggccggattgaagaccggcacatcctcgggagcggtgcgtatgccggagatctgtctgacttcatccggatctctttcttcaatcggaatctgatcgccgttttcaatctgcaagtcaaatgtcgaaagcggtgcggccacaaaaaacggaatttgaaaggcgtttgccaaaatagcgagaccgtacgttccgattttgttggccgtatcaccgttttttgcaattctgtcagcgccgacaatgactgcagaaatatgtttttccttcattgtatgggcggccatgctgtccgtaatgagcgtgacatcaattccgccctgcatcagctcccacgccgtcagccgtgatccttggagaacgggtcttgtttcacatgcgtagatatgaaggccgagatctttttgtttcgctaagtaaaagggggcaagcgctgtaccgtaccggcttgtggcgatcgagcccgcattgcagatggtcatgatctggtcgccttttttaaaaaggtgcagcgcattttggccgatcatacggcatgtttcttcatcctcaatctgaatttgaatggcttcatgaacgagcgttgtcttcgcttcattgattgagatcgcatccctgatcgaatccgtcagtctgtcaagcgcccacgcgaggttgacggcagtgggccttgaactgtttaaatacgctttgacgtccgcgaactgacgtcggaaatctgaaaggtcgcgggcttcaaacgacttggcggagagcgcgagtccgaacgccgcggttataccgatggccggggcgccccttactttcagcgtgacaatcgcgtcgaatacatcttcctttgtttcaagttccacatattcagtgacgtcgggaagcttttgctgatttaaaatgcggatgtaggtttctttccattctacagaacgggggatggcaaattcattggtcatgctgcatcattcctttacacggagcttaaattggtccagaacctcggtgatatgcttcagttcttttctgttttcgatataataggcgccgatctcaagcgccagcttcttccgttcgattcgtttgtcaaacggagtgatttcatctaagtcagccacatgggcgagtccgatcgtgcgccggatcaattcgcatcccgcaaaaccgaccgcttcctcaaacgcgtttttcagtgtgtcttccagcaggtgtctgcgggaaggcaagcagtctttctcccatgcttcactgaatgttttcacaaatgtatcccatacggcggcagtatgatcatataacggctgtctgtcgtcaccgtcgcggctgagggcgtttaaaagcagattggcgataaattggccgatgtcaaacccgatcggtccgaagaaagcaaactcggggtcaatcacctttgtttcatgttcatctgcgaagatgcttcccgtgtgcagatcgccgtgaaccaatgtttccgcggaattcagaaagatggctttcaattcgtcagcgccttctttcagccgggaattgttccaaactttttctgcgtatgggcgcagctcctcttcaaaatcgtttgtctcatggtcgagaaacggttctgtaaacacaagcctttccgtaatattacaaagctcaggatttgtaaactgctttgcgagctgctgctttactttcgcatcaagcgcataatcggatgagtaaaagagcgttttccctaaaaattcaccgatatgaaccgataagttcggataatgctgcccttccagcagcccttttcttgaaatccgcaaatgcgagaggtcttccattaccgtgacggccatttcagtatcggaatagtaaacggccggaacgaggtgcggcacgtgttcgccctggcggatgagggcgctgctttcgattctcgcccggtcaatggtaagcggccagctttcaccgacgactttcgcgtaaggaatcgcctgtttgataatcagtccttttttgttttctttatcgtaaacatgaaagacgtaatttaaattgccgtcgccgatttcacggcatgtcagagtgcttttgctttggaataagccgagcttgacggctaacgcggcggcggagctttctgttaattgttcataaagacttgttttagttgctgacatggatttaccctccaattatgtagtggcagtaagagatcgtgacggagaatacgcccgaaaaaaagcctccttctctgaaagagaaggaggctgaaacagtgcagtccgcctcttatctctcagataacatctgatggaattagcaccgtgccttatgagacaatcgtctcggcgcaaaatgtacgcgccccatttcacaatggaattacggtcggttgctgttggggtcaaaaggccaatccctcgcccaactctcgataagagaaaaatatattgatttgtatcacaattcggattaatcagttgatgaaaatattagcaggtgccggatattcttgtcaacatttttttgaaaattaatataaatcacgccgcaagtcttggaaaaccggaatggttccccgcacgtccgcgctttctgacacatcgatttccgcccggactgcgccttccgtccggtctccttcggctaaaatccggccccacgggtcaataatcaggctgtggccggcaaattcattatcgggattggaccccgtgcagttagaggctgcgacaaaacattggttttcaattgctctggcgataagcaggcttcgccaatgatcaaggcggggcagaggccattccgcagagataaacaggacattcgcgccctgggacgtatgctttctgatccattcggggaaacggatatcatagcagatcagcccggcgcacttgacaccgtcaagctcaaaggaaccgtcgctgtttcctgctgacaagtaaaggtgttcatccatcagctgaaacagatgggctttctgataccgcttcacgatctgtccgctgttatcggcgatgtacatggtgttatagacattttcgccttctttgaccgcaaaagatccggcaacgaggtgtacgttgtatgtttttgccgtttctttaagccattgttccgaaactttgccgttttcatccgccagctggtctagccgtgtgagatcatagccggtcgtccacaactcaggaagcacgattacatcagcatggcggctttcttgctcaatcaaagattctgcttttttaaagttttctgaaggatttccgtatgaaatatcaaattgcaaacaggaaacggtccatttcattttttaacacctcaagtttctctttactttttttatttaaccatatatgatgatggactatcatttcaagacatttttagaaggtgaaaatatgaactttgaaatctcagatgtactcaaacagctgccggaacaatttttcgcatcattggtgcaaaaagtgaatcaaaagctgaaagaaggcagagacgtcatcaatttagggcagggaaaccctgatcagccgacgcctcagcatatcgttgaagaaatgaagcgcgccgtcgaaaggccggaaaatcataaatactcatcattccggggcgcttacagcttcaaaaaagcagccgctgcattttatgaaagggagtacggggtcacgcttgatccggaaacggaagtcgccgtgctgttcggaggcaaggcgggacttgttgagcttccgcaatgtcttttaaacccgggagataccattctggtgcctgatcccggatatcctgattactggtcaggcgtcgcccttgcaaaagcgagaatggaaatgatgccgctgacggaagaaagagggtttctccctgattacagtgtaattcctgaaaaggtgcggagcgaggcgaagctgctgtatctcaattatccgaataatccgaccggcgctgtggcgacagaggcgtttttcgaggagacggtcggttttgcggagcaaaacggcatttgtgtcgttcatgatttcgcgtacggagccgtcggctttgacgggcataaaccgctgagctttttgcagaccgaaggcgcaaaagagacgggaatcgaaatctataccttgtccaaaacgtataatatggcgggctggcgggtcggatttgccgtcggaaacgcttctgtcatcgaagcgatcaacctttatcaggatcatatgtttgtcagcctgtttcccgcggcgcagcaggcggcggcagccgcactttcagcggatcaggcatgcgtcgcggcgcaaaatgacagatatgaatcgagacgcaatgcatggattaaagcctgccgcgatatcggctgggatgtgacggctccggcgggctccttttttgcatggctccctgtgcctgacggttatacgtcacagtcgttttcagacctgctgctcgagaaagcggatgtcgcggtcgctgccggaaacgggttcggaaaatggggggaaggctatataagggtcggtcttctgacaagtgaagaaagacttaaagaagctgcggaacggatcgggaaactgaatcttttcacccgaaaaaacattgacatatcagaataacaatgcgataattcaaaatactttataaaatcattattcttatcaagagcaggcagagggacgagcccgatgaagcccggcaaccgactgataaagcacggtgctaattcttgcagcaggagctgagagataagattcggacataacacgaagcctctttctgctcatacggaagaggtttttttatgttttgcgaaagaaagagaggcgttcacgcatgagcgaagtattggcaacatatcttctgacagacacaacggacagtgaaaagcgggcggaacagattgcggcggggctgacggtaggctcctggactgacctgcccctggtgaagcaggaacagctcagaaaacataaagggcgggtcgtaaaagttgaggagaaagaaggaacctcagaaaacgaaacacaatccgtcatcaccatcgcctatcccgaggcgaacttttcaagagatattccggccgtcctgacgacggtattcggaaagctgtcactggacggaaaaataaaattgactgatcttgaattttccgaagggtttaaacgttcccttcccgggccgaaattcggtatatacggcatccgcaaactgctgggcgaatttgaaagaccgcttctgatgagcatatttaaaggcgtgatcggacgggatctcgccgacattaaagaacagctcagacagcaggcgctcggcggcgtggatctgattaaagatgacgaaattttctttgaaaatgaactggctccgtttgaaacccgcattatcgaaggaaaacaagtcctgaaggaaacccgggaggagacggggcataaaacgctgtatgccgtaaaccttacgggaaggaccgctgaattgcgggataaagcgaggcgcgcggcagaactcggggcggacgcgcttttattgaatgtgttcgcttacggtttagatgtgatgcagagccttgctgaagacagggaaatcccgcttccgatcatggcgcatccggcagtaagcggcgcgttcacatcatctcccgtttacggcttgtcgcatgcgcttttgctcggcaagctgaaccgctattgcggcgctgatttcagtttatttccgtcaccttacggatccgttgctcttccgaaggagtccgcgcttgcaatccatgatgaatgtgtaaaagacgatgtctttcatccgtcgtttgccgtcccgtcagcaggcattcaccccggtatggtgccattgttgatgcgcgatttcggcatcgatcacatcatcaatgccggcggaggcattcacggccatccgaaaggagccgagggcgggggaaaagcgttccgcgccatcattgatgcggtgcttgaagcgcagccgattgaagaaaaagccgcgtcgtgcaaagatcttcagctcgcattagacaaatggggaagggtggaagccgtatgacccgcacgccgctgattatttgtgatttcgacggaacggtcaccatgaacgacaacattgtcagcatgatgaaagaattcgcgcctcctgagtggcttgaattaaaagacggtgttctgtctaaaagcatatcaatccaagaaggagtcggccggatgttcggactgctgccgagcagcttaaaagaagaactgaccggctttattctgaaggatgcgaaaatacgggacggctttttggattttgtctcgtttgtccggtcaaacggcctcccgttttatatcgtaagcgggggaatggacttttttgtgcatccgcttttggaagggatcgtagaaaaggagcggattttctgcaatcatgcatcctttgacaatgaatatattcatatagactggccgcacgcctgtgacggagactgtaccaatcaatgcggctgctgcaaaccgtcagtcatccgtaagctatccgatcagcagaaatttctcattatgatcggtgattcggtcacggatgtcgaggctgcaaagttgtccgatatgtgctttgcgagagattatcttttgactgaatgcaaagaactcggcctccggcatctgccttttcaagattttcatgaggtgaaaacaggcattgaaaacatcggggaggtgcaggcatggctgcaaaagaagaacgctggcgcgaacttgccgaggtaaaacgcgagctggctgaaagagactggttcccggcaacgagcgggaatctttccatcaaagtatccgacgggccgctgacttttctcgttacggcgagcggaaaagacaaacgaaaagaaacagacgaagattttctcttaatcgatgagtacgggaagcccgctgagaccggccattctttaaaaccttcagcggaaacgcttctccatacttacttataccaaaagacagacgccggctgctgtctgcatgtccatactgtcaataataatgtcatctcagagctttacggggatgaaaaacaaatcacttttcaggggcaggagatgattaaggcgctcggattatgggaggaaaacgcgtccgtgaccgttccgatcattgacaatccggcgcatatcccggcattggccgaaaacttcgcgcaccatgcggacgccggatcaggcgcggtgttaatccgcaatcacggcattacggcatgggggcggaccgcatttgaagcgaaaagggtgctggaagcctatgaatttttattcagctgtcacctcaagcttctgtcacttcggccgcagctggtaaaataaaaggaggaatagaaaatggcgaccatcagaattcatgacgaaaaaaatacgctcattgaacatcaggaagaagtagcgcgcttcttagacgaacaagaggtgatctatgagcagtggaacattgaaaaacttccgtctgagctttcggaaaaatacgacctaaccgaagatgaaaaagaacggattctcgcggcgtttgacacggagattcaggacatttcagcccggcgcggatatcagtctcaggatgtcatttctttatcagacaccacgccgaatcttgatgaattattaaaaaatttccaaagagaacatcaccacacggatgatgaagtccgctttatcgtcagcggacacggcatcttcgtcattcaaggcaaagacggcacatttttcgacgtccgtttaaatccgggagatttgatttcagttccggagaacatccgccactactttacgcttcaggaagaccgccgggtcgtcgcaatccgaatcttcgtgacgactgagggctgggtgccgatttacgaaaatgaaagtgtgcaaaactgatagacgcccgaacctctcatgcccccgccggcatgagaggttttttattgtaatataaagtcagctgtggctgttttttaattcttgaatatgccgcattctgtttatatcattacccgaatgggtattattctcgtattcatgctaaagattccaatatgaaatgaaaaaataagttatttagtaaaaaaatgtttacaaataaagtataatctgtaataatgctcaataacccaatcaaacttgtttcctattcttttagcggtgaggggtgaagtgaatgggcagttattctgaacaagaaaaattgcttgtatctattgataaaaaaagaaaaatgatgatagatgcagctaacaggcaagggtttacaggatatgacacgatcaggcacagccaggaactggactgtctgatgaacgcgtatcagcagctggtaaaccgtgatcgtacacatcaccaaggaatacagggccttgtgaagaaaataggcttgttctcccgaggtgacgtcatgcctgcatatgaagcaaacaaatgattgatgataaaacagataacgaagactgaatgcgcttcctgatcaagcgccgcatccgaaagatgaccgcgtacagtcagcagatttctccgctggcacggctcacgaagcgcctcgtactatctgccggctatgatgccgttcctctcgtatatcctcttacacatactctcctttaaataaaaaacaccccgatccagggtgtttttttcatcgagaagcggcagggagggtaatggtgacctctgtgcccttatcgacttcgctttgaatgtcaatcgaaccgccgtacatcagcatgattcgtttacatacgacaaggccgaggccggtgcctttttcctttgacgttacaaacggaagaaaaatgtgttcaagcatatcttcagaaatgcccattccgttgtcggccaccttaatgactgctttatgatcgcgggcttctaaatagatggacagccggccgccttcctgcatggattccagcgcgtttttcgcgacatttaaaatcacctgtttaatatggtctttcgtgcagttgaccttgagcggccgattgacgagaatcttcacattcacttccacattgtatagattcccttcagaataaataatcggcataatctcatcaagaatatcctgcagcgagttcacttccaaccgttcagcagtgggttttccaagcactaaaaactcactgacaatctgattgatccgtttaatctcctgctcaataattgagaaatacagctgatcttcctccgatttgtattttttctgcaaaagctgaatgaagccgctgatccctgtaagcgggttgcggatttcatgggcggtgctggcggcaagcgttccgatcagctccaatttctgcgcttcattttgagcgcgctccagctgggtcttgcgcttaagcaaataatattgaacgaggatgaacagaatattcagcagcacggcaatactggacatcggcagcagcacgcttttggtcagctcattcagctcaaccggtttcggataaacattgatattccaattaatatcatccagatagccgctgaccggtttcacaccttctgattgatcagcccgtccgctggcaaatatcactttattctgattggttgccttgacataaacgtcagggctcagcatattgatcatatttctcaaataatcgacttgtatggcggctactaaataatccgtgacttcccgttttgcgtctaacaccggcacgcagatcgtgaagatgcgctggcctgtaattctgctggagtagtcatttgtgatgaccgtttttttcgtctttttcgccttcgtaaaatacggtctgtcggccaaattcacctttgatttcagatcagtcgtgcttgcgatgacatcacctttggaattcagcatatacagtccgctgaatctgggttcatcctcaaaagcctgatcgagaatgtcaatgatcttttcttcattgacaggcttatcgacagcgatcgcaagtgttgtcatccgggcttttgtttcaccgattaaataattgagcttattgcggtgaaggttgagcatcatactggcttcctgtatgtgtttatcggctattttctgcttttctttttcataaatgaaaaagctgataataagtgccgggatgatcaccaatatgagataaagcttgatctttccccgggcacctttaaatgtattcactctgcatcgctccaacattacacttgaatagaggtattatatcatttttatacttctttaataagaaaaaataaccaaaatgatagaaaaacaaattattttattaaggtctgacaaaaagaagagaaattttggaaacatttttgttgacatttttcattttgtttattaatgtttctctgtaacggtttcttttgtaaaaggatgattgaatgtatgacggataaaacagaaaactcattgaaattatttattgtactgtcacgtgcgtaccgatctattaacgaccatatgaataaacatattcataagcacggcctgaacccgacggaatttgcggtgcttgagctgttgtaccacaaaggcaaccagccgcttcagcagatcggcgacaaaattttattagcgagcggaagtattacatacgttgttgacaaattagagaaaaaagaacttctcatcagaaaagcctcgccgactgacagaagagtgactttcgcacagatttccgaaaagggaatccgtcttttggacgatattttccctgatcatgctgacgaaattaaagaaatgatcagtgtgctgagtgatgaagagatagaaatgtgtacggaaatgctgaaaagagtggggttaaacgctaaacattttcatcagaaataaaaaaggaagccatttgaaaggcttccttttttatattactgattttggtcagtcgcggcgtttctaggctgtatcaatacctcgacgcgcctgtttttgctgcgcccttcagcggttttgttcgacacggccggtttatactctccgaaacctttggcgctgaatacttttgcgtcaagtttcgggttttctgtcagaatagccatgaagttgacggcccgcatgacgcttaaatgccagttagattgatattgtgagtttttaatcggtacattgtccgtatgtccgctgataataatgttcctcggcggattcagcacaaggagattcgagatttccttggcaagcggaatatcttcctgacggatatccgcccgtccggaatcaaaaaagatactgtctttaatggtaattaagagtccttctttagtcagctttgtttccagctgagtttcaagctttttattttttataaattgattgacttgcttttgcacgccttcaagttcttggcggtcggctgcttctctttctttctttttctgttctttatctttttccttgtctttttttaactgatcaacgccgtctttttcgttttcaggaggggtgacgcttgaatattcaagaacacccgtgcctccggtaaacacggcgttaaatgatttagacagcatttggaatttcgccgcatcgaccgagctcatggcgaacaatacaatgaacagagccaaaagaagggtgagcaaatccgcgtacgggatcagccaagactcatccacatgctcgtcatcatgcttcttcttcttttttctcgccattgtttgtctctccttcttgttcagcgacttttgcgcgttcattcgcaggaagatacatgagaagtttttgttcgatcactttcggggcctgtccttcaagcactgacagaacgccttcgatcatgatttcacgcagtttgacttcctgctttgatttgcgtttcagtttgttggcgaagggatgccatagtacatatcctgtgaaaatcccgagaagggtggcgacaaacgccgcactgatggcatgtccgagcgcctcggtattgttcatgttggaaagagcggcgataaggccgatgaccgcacccaaaacgccgagtgtcggcgcatatgtgccggcttgtgtaaagatggctgcgccggcctggtgtctgtcttccatcgcttcaacttcctcagtcataatatctctgataaattctgcgctttgtccgtcaaccgccatactcaggccgtttttcaaaaatgcgtcatccacgtcttcaatgcttgcttccaatgcgagcagaccttcacgtctggcgatttgcgcccattgagagaacataggaattaattgcgcaatggtcagctgtttgttttctttaaacagcactttaaaaagggcaggcacttttttgatttcttttccggggaatgcgatgatcaccgcagaaatcgtaccgaacaaaataatcagaatagctgccgggttagcgagtgcgcttaagctgacccctttcagcaccatgcccacgcttaaagcaatcaaggcgaggatgataccgataatcgatgttttatccatagttttcaccaaatcctttatactagctttctatggttaatatcggtggcagtgcatggaactttagggtgattgagaaattgttcccgaattcttcacagtttctccctttcggcatggagaaagaaacaaaaaagcggctccccgcgaggagggaaccgcttttttcttattgtgcccggactttgatgccgtcctcttccattacgacatggaaggcttttatttcgttgtcatccaataagagatctgtcatttcgtcctcgatcaattcttggatggttcttctgagcggacgtgctccgaaagctgggtggtagccaatttcagcgattttttctttcgcatcatcggtgacgttcaggctgatgccgcgctcttttaatgtgtcttcaagctctgtgagaagcaggctgacgattttcacgagatgttcttttttcagggattggaattcaatgatgctgtcaaaccggtttaaaaactccggtttgaagaacgcgctcagtgaatcaatcaacgtttgttcttccaggacgctctcttcagattggaatccgactttcacctgtttttcgccggttccagcgttgcttgtcataatcaaaacggtatctttgaagctgaccgttctgccctggctgtctgtcagacggccgtcctccataatctgcagaaacatatgctggacatcagggtgggctttttcaatctcatcgagcagcacgatgctgtacggattgcggcgcactttttccgttaattgaccggcttcatcgtgtccgacatatcccggcggtgaaccgatgatttttgatacggcgtgtttttccatgtattcactcatatcgagacggataatggaatcttttgtaccgaacagttcatctgcgagtgtctttgataactcggtttttccgactccggtcggtccgacaaagaggaaggagccgacaggtctgtttttggattttaagccggcgcggcttcgtctgaccgctttcgccacttttttcacggctttttcctgaccgatgacgcgctgatgaagatgctcttcaagttccttcattttgacttgttcatcagcctggagttttccgaccggaatgcctgttttctgttcaatgatggcttgaatatgctccgccccgatttcaggtgaagaggccggagcttcttgtgccagctgcttttccaacgccgcttcttcatcacgcagtttcgcggcaagctcataattttcttcatgaagcgcttttgttttctccgcgtcaattgctttgagtctctcagccgcatcttcttcatttacggtatcaagctccaggttcgccttagagccggcttcatctaataagtcgatcgctttatccggcaggtggcggtcctgaatgtaacgggatgaaagcgtaacacaggcgtttatcgcttcattgctgaatgtgacgccgtggtatttctcgtatttatctttaatgccttccagaatgctgatggcttgttctattgtaggctcgtgaaccatgacaggctggaagcgtctttcaagcgccgcatctttttcaatctggcggtactctttcagcgttgtcgccccgatgacctgcagctcgcctctggcgagcgccggtttcaggatgttcccggcatccattgatccctcggcagagccggcgcctacaagaaggtgaatctcatcaatgaacaagatgacatttttccgttcttttaattcgttcattaattgtttcattctttcttcaaactggcctctgatccctgtattggcgacgagagaagcgacgtcaagcaggtaaagctctttgtttttcaatttgttcggcacatcgccctcagcgattttaagcgcgaggccttctgcaatagccgttttaccgacgcccggttcaccgataagtaccggattgtttttattccggcggttcaaaatttcaattacgcgcgccacttcattatcgcggccgatcacagggtcaatcagacctgcttttgcgccgtttgtgacgttttgagcgagctcgtcgagcaggcctttttcagggccggcctgctgtttattttgattgggagagaaaccttgctcaaacgggaatccgaatgattgcggccccatgctcatagacggttttcgggttaattctgtataacatgtttcacataaaacgaattgtttttgaatggaattgacttgcatgttcaggcgaatcgtcgcctcgtttttctgacaatgttgacaacgcatttgccaaaacctcctcggaaaatgtttgatcatctttgaccaaatagattagaaaataaggtcttaactttgaccttctttgattaatagtatactctgaccttctttgactttcaagtgttttgtttcaaaccccgaaaaataaatgtttacagcatgataagtgatatttgtgaggtctgattatttttgaccaatatagtcagaaaggaaatgaaatgctttgacctttcttgatgaagagtatacgccggccctttttttctttcaatatttttgcttagaggagagagctgaatctgttttctccggggaaggacgatttgttcgtcttttcgggcgacttgtctcataagcatatataaaggcctggacaaatctgcgcttagccggagggtgaaatgggacaaacaaaaggttctgcaagtcagcttgcatttgtatacgtaggcacggttgtaggagccggttttgccacgggacgggaaatcgttgagttttttctgaagtttggctggatcggtctgttcggtatcgtggtaagcggtctgatgtttacatatttaggcgccaaaatcatgatcatttccaaacggattcatgcagcatcttatcaggaattgaacacatatttattcggcaagtccatcggccgcgccgttaatatgtttatgatgtttatattgctgggagtgacctctgtcatgctctccggagcgggagcgctgtttcatgaacagcttggctggtccgcacaagcggggatccttttgacgatcgtactgagctttgccgtcatgacaagcggcgttaaaggtgtgttcggcgtcaatatattggttgtgccgcttttaatttccttctcttttatcgtgacagcagattcatttgtatttacaagcacgagaaacgcggacgaatgggtatggcctgacaagtggaattggcttttgtccgccgtctcttacggcgcgttaaatttatcgctcgcccaagccgtgcttgtgccgcttgcgaatgaaatgtcttcagagaaggtgatcagaaggggggcttattttggcggcgttctgttgacactggtgcttgccgcgagctttttatcattatcagtgctgccggatgtgctggagtttgacattccgatggctcaagtcgtctattcgtattcgcgttcgcttcatatcatttatttgtttattattttcggggaagtgtttacgtcggtcatcggtaatttatacggattggaaaaacaattaaacagttttcttcatataaaaagtacatatatttacggcggcattttggcgtttgctttcattatcagccaaatcggctacggacagctgatttccaccgtttatccggtgtttgggtatgtgagcctcgctttcatcggcgcattgatttgcaaaaaaatcccgaaagaagaataaggatataaggaaaatgtctgtattttttgggaattccccttcttttttcctgacatttctgtataatgaattgggaaatgatggggaggagtaagagatgaaagctcgacgtgtattattgggatttatttttatttgtatcggcattgcgttttttttacagagggcgggagttattcatatatccgcaggttcggcgtggccgtttcttttcattataatgtccgcagggtttcacgccggatttatttttgcgaaaaaaacgcctgaacaggcggaactgctcgttccgggcggtatgttttttgtgctgggctgcctgttttgttttgaaacggcaacggaatggacgtattcgggcgtgacgtggcctgtttatatatgggcgcctgctctcggtctgtttgagctgtggtatttcggcgggaggaagttaggtgtattgattcctgctttcatcctgacagccgtgggagcactatgctttgctggtatgctgatgacggggctgtggccgcttttgatcatcgcagccgcgcttttgtttcacgccgttgcctttatgcagccgaaaaaaagatcgggccttcttattccgggcggcattttgcttgtgacgggcgggttgttatggtttgaaacgctgacggattggacatacgcaaatgtgacatcgcctgtctacctctttgccgttgcgttcggcctgtttgaagcctggctgttcggcagaaagcagagagggcttttgactgctgctgcggttctgtgcgccgcgggcattttcggcatattcaccaatgcaaatgaagtcatcagcgaacgcggctggcccgctctcattcttttgctgggcgccgcttttcacattccgattttcggcccgaaacctgtcaaaaacgcgggacttcttgtaccgggcggcatcttattgattacggggatcttgtttgtctttgaaacggcaaccaattggtcctactccggtgtgacatggcctgtttacctgttggcaacggcattcggtttatttgagctatggctgttcggcgggaaacagaaggcgctgctcatcccggttgcggtgctgaccttgacagcactttgctttatgatgacgaatcagccgatcattccggtttctgttttctggcctgctttatttgttctgatcgggattgcgctgatggtatttccggggaaaaaacgcggggcttaaacccgcttttgcagcctgacacagggttcaggctgtttttttattgtcacgggaaacaacattatggtatgatagcaaaagtgaaaaaagaagaaaatccgtattgatgcgggagaggttctagctacaccctctataaaaaactaaggacgagctgtatccttggatacggtttttttatgttttttagggcgccttctccgaaaaaggcgctttttttatggaatgatagataagggagagaaagacatgaaaaaagaaaaagcagttgtggtgttcagcggaggccaagacagcacgacttgtttattatgggctttgcaaaactttgaagaagtggaaaccgttacattccattataatcagcgtcaccaagaagaaatcgatgtggcaaaatcgattgccgaaaagctcggtgtcaaaaatcacttgcttgatatgtctcttttaaatcagctcgcgccgaatgcgctgacaagagatgatatcgaaattgaagcgaaggacggggaactgccgacaacctttgtgccgggacgcaaccttgtatttttatcctttgcatcgattcttgcatatcaaatcggcgcgcgccacattatcaccggtgtttgcgagactgatttcagcggctacccggactgccgtgacgagttcgtcaaatcctgcaatgtcaccgtcaacctggcgatggaaaagccgttcgtcattcatacgccgcttatgtggctgaacaaagcagaaacgtggaaacttgctgatgagctcggcgcgcttgattttgtaaagaataacacactgacttgctataacggcatcattgcggacggatgcggcgaatgcccggcatgcctgctccgcaataaaggatatgatgaatatatgaaaatgaaaggagagcggaactaattgctttctcaaatttacccgcaggttcagcatccttattcgtttgagttgaataaggacatgcacatctcagccgcgcactttattccccgcgaaagcgccggagcgtgcagcagagtccacgggcacacgtatacagtaaatattacagttgcgggggatgaactggacgattcgggctttctcgtgaatttcagcgtgctgaagaaattggtgcacggcgcttatgaccatacattgctgaatgaccatgacgagttttctgctgatgatgacagatattcactgccgacgaccgaggtcgtggccaaaacgatttacgataaggtgcagtcctacctcgaaacactggagaatcagccggtctgcgtgcagatttttgtcagggaaaccccgacaagctattgcgtataccgcccgaaaaaaggtgataggaatggctaaaggaattccggtattagaaattttcggaccgacgatacaaggggagggcatggttatcggccagaaaaccatgttcgtccgcacggcgggctgcgactactcctgcagctggtgcgactccgcttttacatgggacggctcagccaaaaaagatatccgctggatgacggcggaagacatttaccgcgagctgagagaaatcggcggagacgctttttcccatgtcaccatctcaggaggaaacccggcactgttaaagcagcttgacgcgctgattctgctgctgaaagagcacggggtgcgcgccgctttagaaacgcagggaacggtctatcaggattggttcacaatgattaacgacctgacgatttcaccgaagccgccaagttcggggatgacaaccgattttgcaaagctcgatcacattgtgtcttcgcttgatgcggcagaaaggcttaacgcggtcagcttaaaggtcgtcatttttaatgatgaagatctgcaattcgcgaaaaccgtccacaagcggtatccgaatattccgttttatcttcaggtcggaaacgataacgtccatacgacggacgaccgggcattgatcgcacatctgctcggaaaatacgaaacactcgttgataaggtttcagccgattcggatctgaatctcgtcagagtcctgcctcagctgcatacattgctttggggaaataaacggggagtttaatagaaagggagatttatatgacaagaaaagaatcagaattagaaggagttacgctcctggggaatcaagggacaaactatttatttgaatatgcgccggaggttttggaatcatttccgaataaacacgtgaaccgtgattatttcgttaaattcaactgcccggaatttacgtcgctttgcccgaaaacgggacagccggattttgcaaccatctacatcagctatattccggacgaaaaaatggtggaaagcaaatcgctgaagctgtatcttttcagcttccgcaaccacggagatttccacgaggactgcatgaacatcatcatgaatgatttgatcgaattaatggacccccgctacattgaagtatggggaaaattcacgcctagaggcggaatctcgattgacccgtatacaaactacggcagaccgggaacaaaatatgaaaaaatggccgaacatcggatgatgaatcatgatatgtacccggagacgattgataatcggtaattattccgttgtgtgatacggagtgtgaaacgaagtggagtcacactaaaagtgggaaaagtcacacctgaaaatggctctactcatgggaattgtattaaaaagtgtgacctgaggtgcaacctgaactgtaacttttatgcagtgaaaaattgatagtacagaagcagattaaggcgtacaatttgtacgtcttttcttttttatcccaaaagaaaaaatgcctatctagagatcataggcattaaatattattatcaatatcttcatttattttttgtctaagtttcgaaccttctctttaacatttgaaacagctcttttttgaatttcatcaaagttctccgcccatgccacttctgattagaacttcactttcaaaattgaatatctcatttatttctgactgttcttcatctgtgaggtgatggtattgaagttgtttagcatttacttcagcagctacatcaattctaactttagttgttctggttgtacaatttcatattcaccttctgcatactcttgttccgcataatggactccccattgacagagctcctgcaagataggtttaagtgattctccaagttcagtggatgaatattcaaccttcggcggtacttgattatacatctttctgctcacaagtccactggcttcaagctctctaagtgtttgaatcagcattttctgagttatatttgggatcatgcgctttaattcactcgttctctttggtccattcattaaaaagtataatacaagtcctttccattttccgccaatgacttcctttgtcacttcaaacccacagctaaattttttcatgtctaaagctctccattccacatttattactttttagttactatatcacaaaaaagtgggtacttccgataatgtgcttactgaaggatactatatcttgtaagttgttcttcaagtacttaaaggtactagacataaaataaaatcaattctaaaggagtgttaagtatgggtaaatttgaaggtaaaatagcgcttgtaacgggtggaacaagtgggattggtcttgctgcagcacaaaaatttgtaaacgaaggtgcatatgtttatatcacgggacgtagacaaaaagaacttgataaagctgttaaccaaattggcaagaacgtaaccggtgttcaaggtgatatttctaagcttgaagacttagacaaactatatgacatgataaagcaggaaaaaggtaagttggacattctttttgctaatgcaggcatcggcaacttccttccattaggtgaaattactgaagagcaggttgatagaacgttcgacattaacgttaaaggaaccatctttactgttcaaaaagcgttatcactattcccggacaaagtaggttctattattgtaacgggctctactgctggatcaattggcaacccagcgtttagtgtatatggagcatctaaagcagcattaagagcactagttcgcaactggattcttgacctaaaaggtactgaaatccgtgtaaatgtggtgagtccaggagttattcttacacctgcatacgatgagctttttggtgatgcacttgaaggagcgatggaaaataccagaaatactgttccagctggaaaagttgggacacctgaagaagtagcaaacgctgtatctttccttgcttcagatgaaagcagttacttgacgggtgttgaattgttcgtagatggcgggctagcacaggtataatttcactgcgcagagattacaaatagtccccaaaaaaggttaaaatcaatcgtttggtaaggtgtgaaattggtgtgacttcatgattaacgtctagagcaagtacttatgggacaagactttgacctgccttttcttccacgaggactgcatgaacatcatcatgaatgatttgatcgaattaatggacccccgctatattgaagtatgggacaaattcacacctagaggcggaatctcgattgacccgtacacaaactacggcagaccgggaacaaaatatgaaaaaatggccgaacatcggatatgaatcatgatatgtatccggagacgattgacaaccgttaattttcaggcggagtacggtctcggaatataacctaaatacccccgctttttaagtggggggtatttttcgtctgtgccgcgcagccaaaaaggtgcatgatatttgcacagaacttctataaggaaaagagagatcatttggagaaaagaaaaagacgagtaaacccggggggagcgtactcgccgcttcaatacgtgacgggtgctggatggcagctcgtctgtttcattataaaatagggaacatacgtttgtaaaggtctgcgcagttttttctcattcggagcggatcaattgtaaaggaatggtcagcatgatagcatgtcctgtaaaaagaaggagtgttcgttatggagccgttagagttaaacggtgtaaggcttaaaatgtatgattgtaaagaaagtgcgggcaaaaacggccgcatgatttcattcgtattgaaggtgacatctgaaacgtatcatgatattgccgtccttttgtatgaaaaaacatttgacatcaaggcgcccgagcgtggacttgaattccgcggtaaaataaccaactactatacatccgtcactaatctttacaataaagatgagacaggtgatttttttgtagaaatgaccgagatctgaattcatttgaaaaagctgccgggcggcagcttttgtgcgggatatgtaaatggttcggattgttcggggggtttaataggagtctctgatgattttataattcttatggttgacgacagtgagggaatctaattcaagatcacgataattatccatgatggttacatcaactatgacggaattttcatttactttttcaacaataccggttaatccgtttttaaattcaatgacgtttccaaccttagcaattttcacgagcttcctctcctttatcataaatcctgtttgaaaatattttgcagtattttctttaagaagtaaagcgatatgggtatcagcccgctcaatcattgtcccggcgggggaaagatggtatattgattttcgggaaaaagccgagaaaaggaggctgtgttcgttgctgcctgaggaaatttcagaatgtatcaaccaaatgcgcatcggtgaaatcaaagaattcagggtgcagaaagaacattttcttgcatttcgagcagttttatcgaagcaggaagattttaagcatttccgcggtattgcccagcagggcggagatgttgttttccagtatttagaacagccaagaagctgacggctcctcgcacttgaggagtctttttttgtttcttagtttctcatttcatctggctgtaacagatgtaaacaaaatgtaaaatccctccgatggatacttttactgctatttggttaatgttgtgaaaatgacggctgttttcctgccaataacaaggctgttaacgaacttcttccatcataaaagctgattgggagcactggaaaatctttaaccgtgaatttgcgcacagctcttgttaaggtagtgaagtatttaaggaggaaatcgtatgacgacaaaatttgctgccttggctgtcttttttctatgttttatgcctgcatcaaaaattgaacatacagaagctctgtttacttttgcgaagaagccaaagcaagaacccagcacactggttgctgatttaaataaaaaaagctcggttccgaagctttcaaaaacggatcataagcattctatccaaccgataaagctgtcatctcaccaagagaagaaagcagaaccggaagagacggcttatcagccgccgaaaaaaacgtattcccgcgctgacagacaacttctgtcacgtctcgttcacgcagaagcgaaaggtgaatcttataaagggaaggttgcggtagccagcgtagtgctgaaccgcactgaaaaaaacggcttcccggataccattcggggcgtgatctatcaaaggaatgcatttgaaccggtagcaaacggaagcattaatcaaaagccggataaggattccatcgccgccgcaaatgaggcgcttgaccatccgggcagagaaacggacgcgttgtttttctacaatccgaaaacggcatctgaccactggatccgttcccgaaaaattatcgaacggatcggcagacacgtatttgcgatgtaagcatagcgggatcaaaaatatcccggctatgcttttttcaattttgagaaatcgaaaatattttcagaacttgtctcatatgatgatggaagaacgagagacaaggagagacaccatgaatcgatttgtgaaagggatcattcttttatccatcgccgcctttttcgcggaatgtctggaatttgtcgtgaatatgatactggcgcgggagcttggcgagcatgggatgggactttacatgagtattctgcccaccatttttttaatcatcgtcatcgccagtctggagcttccgatctccatttcaaaattcatcgcggaatccaatcagaagctgcatgaaagcatgctccggcatgccttcagaatgaccgccgtttttaccgcgttttcaaccgcggccgcaagcatcgcgctgccgttcattcctgtattcgatacgtatcacccgtttattaaagggattgtcatcgggctgattccagtcgtcgcttttacatccatcgccagaggttattttatgggtgtgcagcaaatgggaaaaatcgcggttgcgaatgtcatgaaaaaaatcattcaagtgctttgtctgtttatcttttttcaatggtattcttttgaaattgatatggccgtgctcatttcattatttgtgctggtcgcaagcgatgtcgtggtgttcgtttacttgtatacgcagtttattttggcgcggagggcgctttccggccatcagcacattcatcttcgcgggaaagacgtgcggaaacgcctcctggccgtatccatcccgacaacgggacttcgtatatttcatgcggtgacaaacgccattgaaccctttttagtgaaaggagcgctgctggcgtccggggcagccgggacagccgcgattgatcaatacggcatgcttgccggtgtagcgatgacaatcggttcgtttcccgcgtttatcgcccattcgctgatggtcgtcatgattcccagcatttcagaagcgtatgcgctgtcccaatatgatattgtgctgaaacggctgagacaagcgatttttattacattcggctacggcattccggcagtctgggtcatgtttcagttcgcgggcccgctgacccatttgttttttcagtctccggaagcgcagtattatttgcagcttttgtggccgttttttctttttcatctgtttgtgatgccgcttcaggcctgtctgatcggtatcggccacgtgaaaacggcgttttatcataacgtatggagcagcattgtagggctttcgatgatgtatgtgctcggttctatgccggaattgcaaatgctcggcattatactcggcatgaataccggcatgattcttctgacaagtttacattacgcgacgatctgcaaagacctcggtgtctccgtgtttttgacgggcggcggaagaacagcgccccggatcgaaagctgaaaaggctgatacatttcaataaggaagggcaagctatccgaaacgcgtgaaaggaagatcatatgcataaaaaccgcctaattgtatgtgcagtccttttgatagctgccgccgtctggatgcctgaagcaaaagcctcatcagaaaaacaggcagttcccgccgtgtttctgatgaagacgattgaaggagacgagatatcgattccgaataaagggcagaaaacgatattgcatttttggacatcgtggtgtccgccgtgcaaaaaagaactgccgcagttccaaacgtattttgaacagcatcagtccgatgatgtaagccttgtaacggtaaatttgatgaatgccgagcgaaacaaaaataccgttcaaaactttgtcagtcagcaccatctcactttcccgattgttcttgacacgaaaggcgagcttatgaaggaatacgatgtcatgacgattcccacgtcatttctgctgaatgaaaaaggagaaatcgaaaaaaagatcgtcggtccgatgaccgcctcacaattaaaagaatggtcagagaaataaaaaggtgcgggaggaattcctcccgcaccttttttgcatataatgaacagctgaagaaacactaatgataattattatcaaaaagaaattaaaacaattataattgaaatcttccgccggcatgctataataaagaaaacactgcgataacactgtgaaaatgctgcctgtcaggcggctgttttgcttttatcggggaattgaagatgatttgcgttctcaattagagaggagaattcataatgaatgaacaagtgatgacacaaacccattcacaacagcacatacaagaagagcgggccggaaaaaagtggctccagcatgcagaactcattgcggcgctcgtatccggcgtccttattcttgcggcctggttttttaccgaaacaaaaggcctgtccgtcactttgtatatccttgccttcctgatcgggggatttgcaaaagcgaaagagggaattgaggataccattgagacgaaggcgttaaatgtggaactgctgatgatttttgcggctgtcggctccgccctgatcggttattgggctgaaggtgctgttcttatctttattttttcgttaagcggcgcgctcgaaacatatacgatgaataaaagcagccgtgatttaacatctttaatgaaactggaaccggaggaagcgaccctgcttgcggacggacgggaaaagcgggtgccggctgctgaacttaagatcggtgacataatcgtcattaagccgggcgaacgcgtagcagcagacgggatcattgagtctggcgtgacgagcctcgatgaatcggcgcttacgggtgaagcgatgccggcggaaaaaacagccggtgattctgtgtttacaggaacggtaaacggaaacggctccttaacggttcgtgtgacgaaaacaaatgaacagtctttattcagaaaaatcattcggctggtggaatcagcccaaaacagcgtgtcaccggctcaggcatttattgaacgattcgaaagtgtctatgtcaaaggcgtgctgttagccgtggctttgcttttattcattcctcatttcgctttaggctggagctggagtgaaaccttttaccgggcgatggtgtttatggtggtcgcctccccgtgcgcgcttgtcgcttctattatgcccgctgcgctttcccttatctcaaatggtgcccgcaacggattattggttaaaggaagtgtgtttttagagcagctgggaagcgtacggatgatcgcatttgacaaaaccggcacggtcacaaagggacagccggcagtcgcggcatttcaagctgcggaacatgtgagtgaagatgagatcatgcaggcggtgtatgcaatggaaaagcaatcaagccaccctcttgcaaaagcgatagctgaatttgccgaaagccggggcaccgcgcccgcaggacatctatcgattgacgagacgtccggattcggtgttcaggctgaaatagaaggcgtcaaatggatggtcggaaaagcggggtttgcaggtgaagatgcggcagatgcttttttgcaaacatcgggaaaagaattaaaggataaaggttttacactggtctttgttaaaaaagatgaccggattgcgggctgctttgccttaaaggatcaaatccgacctgaagccaaagccgtgatggctgagcttgaatcactgggcattaaaacagccatgctcaccggcgatcagtctgaaactgcggctgccattgcaaaagaggcgggcatgacgacggttgttgccgattgtctgccggaccaaaaggcaaaagaagtgaagaagctgaaagaaacgtacggcacaatcgccatggtgggggacggcattaatgacgcgcccgctctgaaaaccgctgacgtcggtattgcgatgggcgggggaacggacgtggcccttgaaacggctgacttagtccttatgaaaaatgatcttcacaagcttgtgaaaatgtgcagactctcaaggaaaatgaaccggattattaagcagaatattgttttctcgctctcggtcatctgccttttgatctgcgctaactttctgcaggtgatggaactgccgtttggcgtgatcgggcatgaggggagcacgatcctggtcattctgaacggactgagattattaaaataaacatgacagccgcacatcgggcggctgtttttttaatgttcgttcacagcataaacgccggaaaactgatagaatgaataaagagtcactttggtaaggaggaaaagcaaaaaatgaacagattagaacgtgtttcatcttggctgaaaaaagaaggacatgatgcggcgtttatacatactaaggaaaacgtattttatttaactgatttttacacggatccgcatgagcggttaatgggattgttcctgtttcaggaacaggagccgtttttcgtttgtccgggaatggaagccggacaagcccgcagcgccgggtgggagcatgatattatcggctacggcgatcacgaagatccgtgggagctgatcaaagccgagctcacaaaacgaaatgtgcggcttgattccatcgcggttgaaaaggattcgatctctctttcccgctcagaacagctcaaacaagcttcagggggcgcggcatttgtttcggcagaagaaacgctcaaccaattccgtctcgtgaaagatgagaaggaaatcagcattctcagggaagcggcaaaactcgcggattacggagttgaagtcggtgtcgcggcgcttaaagagggtgtgagtgaaaccgaagtactcgcgcagattgagtttgagctgaagaaaaaaggcgtgcagggcatgtcattttcaacgatggtgctgttcggggaaaaatcaggccagccccatgggaatccgggtgcagaccggttgaaaaaaggcgatttcgttctgtttgatctgggcgttattcttgacggctactgttcagacattacgagaacattcgcataccaatcaatcagcccgaaacaggaagagatttacgaaacggtgcttaaagctgaacaggcggcgcttcaattaagcaaaccaggcgtcagaatcggcgatctcgatttaaaagcccgcggcattattgaaaaagccggatacggagactatttcccgcaccgcctcggccacggactcgggatttcggttcacgaatatccatcaatgagcagcgcgaacgacacactcctcaaagaaggcatggtatacacgatagaaccggggatttacgtgccggatgtcggcggcgtgcgcattgaagacgatgtgttcgtcacaaaagacggcgccgaagcattaacgcagtatccgaaagaattaacgattctgaaataaaaagctttgtgataaaaaaggacggttctggaacgcagcgtccttttttatcaccttttaaatgaaaaaatcatcaaaatgctgaaatggtttgatgtcatgcttttcattcaggggccgcagggcaaggtaactgccgccgactatggccagacacaaaccgattaagcaaagaatccccatcgctgttcttctcctttcaaacgaataggatgtatctgtttctagcttactgtatgaaacgcattccagatcaagggaaaaaaagaaaggggggacgccatggctacgatcagagacattgccggcgctgccggggtttccgttacaacggtatcaagagtattaaacgatcatccttatgtaagtaaggacaaaagagaaagagtgaaaaaagcgatgcaatcgctcggatatacgcgcaacattcatgctgtacatttatccaaaggtttttccgatatgatcggcgttgtgcttccgtcggtgaatctgccgtattttgcagaccttgttgcaggtattgccgaggctgccgaagcgtcaggcgtgcatctttctttataccagacagattatcagcagcaaaaagaacgttttgccttatcacaattacaggagcgccaagtggacggcctgattatctgctccaaagcaattcctgatgaacatctgcttaccgtgaaagaaccgctcatcctctgccagtacactgatgcggcggggctttcctccatcagtaatccgcatcgggaagcatttcggcacggtctggattatctgatagaaaagggacaccggaaaatagcgatcagcctggccagaaaaaagggaaaaaacagtcaagtacgcattgccgcatacaaagaggcgctcaagaagatcgggcagccttacagggaagagctggttgtggaaaaggcgctgacgctgcttgacgggaaagccctttttcatagatggaagagctgggatgacaaaccgactgcgctgtttgcggcgaatgatcaagtatccgcaggtctttaccttgaagccaaggcaaatgggacgcgcatcccggaagagcttgcgattttgagcatcgacaatcatgatatcagcaagatgttagggatttccacaatagatatacaaacaaaagaaatgggaaagcaggcttttcacatgcttgagaaccggatcggcggcgggcctccggcaaggaaagttcttgattaccgccttattgaacgatcaaccgtctaaaaaaagaattgacgcgctttccgttcgttttgtacgatatgaggtattgaatgacaaaggagctgaggatcatgaaggggtcctttacagttgaaaaggtattaaataacaatgtgctcatcgcaacacatgatagatacagtgaggtcgtcttaatcggaaaagggatcggctttggaaaaaaacaagcggatgtcattgaagataaagggtatgacaagatgttcatcttaaaggatgaaaaagaacaaaaacaatttaaaaagctcctcggttatgtggacgagacacttgtcgacatctccaatgacgtcatttatcatatcaagaagcggacaagccaaccgttaaatgagcatatccatattgcgctgactgaccatatcgcctttgcggtaaagcggctgcagcagggttttgacattaaaaacccgtttctcatggaaaccgaaacgctttatccggaagaattccaaattgcccgtgaagtcgtcggcatgattaatgaaaagacgggaatctgccttccggaaggggagatcggctttatcgctctgcatatccactccgccctgacgaatcggcccctttcagaggtcaatcagcattcacagctgatgtcccggctcgttcaggtgattgaggaatctttccagatgaaagtgaataaagaaagcgtccactatttgcggctgatccggcatatcagatttaccatagacaggattaatcgggaagagcagacaaaagaaccagaaaagttaatgttattattgaaaaatgaatacccgctatgctacaatactgcttggaaactgataaaaatcttgcagcaaatactgaaaaaaccagttcatgaggcggaagcggtttatctcacgcttcatttgtaccgattaaccaataaaatttcataatttcagttgaaaccttaaaaacgtgtcactgattcgatcaggcatgagtgattgagggtaaaaaacgggaagaacggtcccgttattttgcacaccctttttactcatgccttttttgttgtgtaaaagggcaaatgtaaacggttaaactgaagacttgcgccagtgaattcgttgtcatgaattttcgctgtaaggtcacactagctaacagaggaggtacatcttttatgtttaaagcattattcggcgttctccagaaaatcggccgtgctcttatgcttccggttgcgattttaccggctgcggggatcttgcttgcgttagggaatgccatgcagaacaaagatatgattcaagtcatgcacttcttaagcaatgataacgttcagcttgtggcgaatgtcatggaaagcgccggccaaatcgtatttgacaacctgccgcttctttttgcagtaggggttgcgatcggtcttgccaacggagacggtgttgccggaatcgcggctattatcggatacttggtcatgaacgtatccatgagcgccgtgcttatggcaaacggcagtattccgtctgacaaaattgaacgggcaaagttttttgcggaaaaccatccggcctatattaacatgctggggatacccactttggcgacgggcgtgttcggcggtattatcgtcggggttctggccgcgttattgtttaacaagttttataaaattgaacttccgcagtacctgggattctttgcgggtaagcggttcgtcccgattatcacatcgatttccgcattaattctcggtcttattatgttagtgatctggcctccgatccagcacggtctgaattccttctccacgggtcttgtggaagcgaatccaaccttggcggcctttattttcgggatgattgagcggtcattgattccgttcggtcttcatcacattttctactcgccgttctggtatgaatttttcagctataaagatgcggccggagacatcatccgcggagatcagcggattttcatggctcagatcaaagacggcgtacagctgacggcgggaacatttatgacggggaaatatccgtttatgatgttcggtcttccggcggcagcgcttgcaatctatcatgaagcgaagcctgaaaagaaaaaacttgtagccggaatcatgggttctgccgctctgacaagtttcttaacgggaattaccgagccgcttgaattctcattcttgtttgtggctcctatcctgtttgcgattcactgcgtattcgcgggactttcctttatggtcatgcagctgctgcatgtaaaaatcggtatgaccttttcaggcggtctgattgactacttcctgttcggaattctgcctaaccggacggcttggtggcttgtcattccggtcggcttaggattagccgtcatttactacttcggtttccggtttgcgatcagaaagttcaatctgaaaacgccgggccgtgaagaagaggctgcggatgaaggtgcgggcgcctcaggcgaagccggcgaccttccttatgaaatcctgcaggcaatgggtgatcaggaaaacattaagcaccttgacgcttgtatcacgagactccgcgttacggtcaacgaccagaagaaagtggataagactcgtctgaaacagcttggcgcctcaggcgttcttgaagtcggaaacaacattcaggccattttcggcccgcgttctgacggtttaaaaacacagatgcaggatattatcgccggacgcacgccgcgccctgaaccgaaagtatccgcacaagaagaagtcagccagcaggttgaagaggttatcgcagatccgctccgaaacgagcagggtgaagaagtgttcgcttctccgatcaccggcgaaatccatccgattaccgatgtgcctgatcaggtgttctcaggaaaaatgatgggtgacggttttgcgattcttcctgaagaaggaatcgtcgtatcgcctgtccgcggaaaagtgctgaatgttttcccgacaaaacatgcgatcggccttcagtctgacggcggaagagagatcctcattcatttcggaatcgacacagtcagcctgaaaggcgaaggattcacttcttttgtttctgagggtgaccgggttgaaccgggacaaaagctgcttgaagttgatcttgaagcggttaaacctcatgttccttcattaatgacaccgattgtctttacaaatcttgccgagggtgaagcgatttccctttcggccgaaggtaccgtaaaacgggaacaaaaagatattgtgaaaatcggaaaataagcatataaatacgccgtgcttgtcagatgacaagtacggctgtatgatataatattgtgtagtaaaatagctttaatttaaaggagaatgataatcatggcacaaaaaacatttaaagtaacagcagattccggaatccacgctcgtcctgcgacagttcttgtacagactgcaagcaaatacgatgctgacgtaaacttagaatataacggcaaaacagtaaaccttaagtcaatcatgggcgttatgtctctaggtatcgctaaaggcgctgaaatcacaatttccgcttcaggcgctgacgaaaacgatgctcttaacgctttagaagaaacaatgaaaagcgaaggactcggcgagtaatgcaagaattaaaaggaataggcgcttcagccggaattgcgattgcgaaagcataccggcttgaagagccggacttaacggttgaaaagaaaaacattgctgatgctgcggctgaagtaagccgttttgatgaagcgattgtacgttctaaagaagagcttgaaaaaattaaagagcatgctttaaaagaactgggacaagacaaagctgacattttctccgcgcaccttttagttctgagtgatcctgagctgttgaacccggtaaaggagaaaatcagcacagattcagtcaatgctgaattcgctttgaaagaaacagcttccatgttcgttactatgtttgaatcaatggataacgaatacatgaaagagcgtgcggcggatatccgtgacgtaacaaaacgtgtgacggggcacctgctgggcgtggaaattccgaacccgagcatgatctcagaagaggttgttatcgtggctgaagatttgacaccgtctgatacggcgcaattaaaccgccagtttgtaaaaggttttacaactgatatcggcggacgcacttcacactccgcgatcatggcccgttcgcttgaaattccggctgttgtcggcacaaaagcggctacagggacaattgaaaacggtgttacggtaatcgtagacggcatcgatggtgatgtgatcatcgatccttccagtgaaacgttaaagaaatatgaagaaaagcacagtgcttacctggcgcaaaaagctgagtgggcgaagctcgtcaatgaaccgactgtttctaaagacggccatcatgtagagcttgccgcaaatatcggcacacctgacgatgtaaaaggcgttcttgaaaacggaggagaagctgtagggctttaccgtacggaattcctttacatgggacgcgaccagcttccgacggaagacgagcagtttgacgcttataaaacggttcttgagcgtatggaaggaaaatcagttgtcgtgcggacattggatatcggcggcgacaaagagcttccttacctgcagctacctaaagaaatgaacccgttcttaggctacagagccatccgcctttgccttgaagagcaagaaatcttcagaactcagcttcgtgcgctgcttcgtgcaagtacatacggaaacttaaaaatcatgttcccgatgattgcgacagtaaacgagtttaaacaggcgaaagcgattcttctcgaagaaaaagaaaaactcgtcgaagccggcgtagcggtttctgacgatattgaagtcggtatgatggtagagattccgtctacagccgttatcgcagatcagtttgccgcagaagttgacttcttcagtatcggaacaaatgacttgatccaatacacgatggctgctgaccgcatgaacgagcgcgtggcttatctgtatcagccatacaatccggcgattctccgtctgatcacccttgttattgaagccgctcacaaagagggcaaatgggtcggcatgtgcggagaaatggcgggagacgaaattgcgattccgattcttctcggcttaggcttagatgagttctcgatgagcgctacatccatccttccggcaagaacgcagatcagcaagctttctaaaaaagaagctgaatcattcaaagaaacaatcttgtctatgagcacgacagaagaggttgtcgcattcgttaaagaaacattcaataagtaatacaacagccagacggtgtaagccgtctggtttttttcatattcggaaaaaaggggggaacaataactttcaacaggagggattatcatgacaaaatcatttgcagcgggggatacggtctatgtgatttaccgcaatccgcatgccgccaatgtcgcccatattaaagaggcggagatcgtccatcacccgtatcatgagggagaattgtctctgtttttatacgaaacctatcatccgctggccgaagatgacgcggtcttttcgacatatgaggaagcggaagcgctttacagcgagctttttgaagaagaccggtatcattgatcaaaggaaatgtttacaacgcatattcactctcttttaaacggaaagtaacaacatgagaatatgtaaagggagtgtctgtctatgctgaagccgtttgtgccccagcttgtttatattgaaccgagagcgctcgaatacccgttaggacaagagctgaagaataagtttgaaaacatggggcttgagatcagagaaacgacatcgcataatcaagtccggaatattccgggaaaaaatcacttgcagcaataccggaacgcgaaatcaacattggtaatcggcgtccggaaaacactgaaattcgattcttcaaagccgtccgccgaatatgccattccatttgcgacgggctgtatggggcattgccactattgctacctgcagacgacgatggggtcaaagccctacatccggacatatgtcaatgtggaagagattctggatcaggctgatgagtatatgaaagaacgggcgccggaatttacaagatttgaagcctcttgtacgtctgatatcgtcggaatcgatcatctgacacatacattaaaaagagccattgaacatttcggacaaagcgaattgggacagctcagattcgtgactaaatttcaccacgtcgatcatttgcttgatgcaaagcataacggaaagactaggttcagattcagcatcaatgcggattatgtcattaaaaactttgaaccgggaacttctccgctcgacaaacggatagaagccgccgtcaaagtcgctaaagcgggctatccgctcggtttcatcgtggcgccgatttatattcacgatggctgggaggaaggctataaggaactgtttgagaaacttgatgcggcgcttgatgaagacgttcggcatgacatcacatttgaactgatccagcaccgttttacaaaaccggccaaacgggtgattgagaagaactatccgaaaacaaagcttgagcttgatgaagaaaagcgcagatacaaatggggacgctacggaatcggcaagtatatataccaaaaggacgaagagcatgacttaagggaaacactcgaatcttatatcgaaacctattttccgaaagcgaaaatcgaatattttacgtaaggcggagctgtcggtacgacggctctttttttgctgcgccaaatggcggaaatttttgatatttatttcaagatttattcattttcatgaccgaaagaccgatataactctcaggaggggatggttatgtttaaaaaaatgcatatcaaaattgctgtgtttgtatcggcaatgcttatcgtaacggttgtttttttaacggtttcttcatatttgacattaaagccgatgatgacggatgaagcaaaacgtacgacagagaatgtcaccaattcactcggtcagaacattgagcttcagctgaaaaatgatgagaccgtattattgagattagcaggcggtgaattgtcccggtcttttctatcagatgggaacaaagaaaccgcgcggctttttaacgatgagttaaaacagatcggacagaatgacaaatatgtcgcgcttgcgtacgtcggaaccgcaaacaaacaaatgtttacatatccaaaggccgactttgccaaagactatgatccgacaaatagaacgtggtataagatggcggctgaaaaacccgataaggttgtctggactgacccttataaagatgcagtgacgggagacatgatcgtgacggcgtcaaaagccattcaaaacagcggaaccgtcgtcggagtggcgagcttagatctgaaactgtcctccattcagagcatggtcaacgagcaaaaggtaccgtataaaggatttgcgtttttggcggatgaaaacggctctcttctggcgcatccggaaaaacagggaaaaaatatttcggaagaccagacgttaaaagacatcaccacggataaagaaggcatcaaagagctgcaggggaacatggtcgtctaccaaacggtaaaagaaacagggtggaaagtcggaacgcagtttgaaaaaaatcagctgatgggagtagccgacaaaatgaacacggtgagcatttttatgtcactgatcgcccttgtgattacaatcggactcagctatttcctagcaaaaacgataaccgggccgattcagcagctgatcgcgaaaacaaattcagtctcagcgggagatttaaccgtccgcgctcagacgaaatcaaaagatgaagtaggcgagttaacaaaagactttaaccaaatggttgaaaatatgaaagagatggtcgaacaggtcaaggcctcctcagaaaacgtgtccgatacatctgaccagctaaccgtcatctcacaggagacaaatgaaacgagcggacaaatcgcaaaagcgatagaggaagtcgccgccggagcgacagagcaagcgtcagaggttgagacgatcaatgaaaaatcagaaaatctctcagtcaaaataaaaggaatcgcagatcgcgcgggcagcataaaacaactctcaaaatcttcagaggatgccagctacaaagggctggacgcgctcggacagctgctgatgaagtcaaacgaagccaattcagaaacgaaaaaagtagaggcaatgctgaatgacctggaagaacaaacgaaaaacatagaagaagtcgtgacggcaatatccgccatttcagaccagacgaacctcttggcgctgaatgcgagcattgaagccgcaagagcgggagaaagcggccggggctttgccgtcgtcgcggaagaagtccgcaagcttgctgaacaatcagctctttcttccggccatatcagtgagacggtccggctgattcaatcagagacaaaagaagcgtcacacgcgatgattgaggcaagcagaatgaatgatgaacaaaacagcgccattcatgaaacgggtgaggtcctcaatctgattacgacggaaatgcagtctcttgttcaaggtatagatcatatttacaatgacattcaaaaaatgagtgaagaacaagccgcgattcaagaagcgattcaaagcatctccgccatttctcaagaatctgcggcagcggcggaagaagtgaatgcttctactgatgaacagctcgttacgcttgaaaaagtgaagcaatcgactgacatgttaaagagcgcgagcgaagatctcatcagcgccatttctaaattcaccttgtaacgcggtctctatcagcctataatatggtaatatagacatgaaagagtgatatatgaatcgcatcaagggaggaaagcgcagtgaacaaaacggttggatttatcggtttgggcgtcatgggaaacagtatggcatcgcacattttagaagcgggctatcctgttttagtctacacgcgtacgaaacaaaaagcggaagagattctgaataagggagcggtctggcaggagacggtcaaagacctttcagagaaagctgacattattattaccatggtcggctatccgagtgatgtcgaggaaatctatctcggcgaaaatggcattctccggcacgcaaaagaagggacgtttgtcattgatatgacgacatcaaaaccgtctctggcgaagaagatagcggagaaagccaaagaaaaatccattcacgccttggatgcacctgtttccggtggagacatcggcgcgaggaacggaacgcttgccattatggccggaggagaaaaagaagcgtttgaagcatgcctgccgcttttctccgttatgggggaaaacattcagtatcaagggccggctggcagcggccagcatacgaaaatgtgcaatcagatcgcgattgcagcgggaatggtcggagtggctgaagcgatggcttacgctgaaaaatccggtctgaacccggaacaagtgctgaaaagcattacaaccggagctgccggaagctggtcattgtccaacctcgctccccgtatgctgaaaggcgattttgcaccaggattctacgtgaaacactttattaaagacatgggaatcgcccttgaagaagcggagctgatgggagaagaaatgcccggattggcgctggccaaatcattatacgacaagctttccgcgcaaggggaagaaaacagcggaactcaaagtatttataagctttgggtgaaataaaaaaagattgcccgaacgcgactattttatggatgttgaggaagcgaatacttacggtattgttggtagtgttttataaacaatgatctgcaaatcttgtattcttagggccttaatgaagacaggaacttggcaggataatgtattaatgtgtatccgtttataatattctactgtttggaatccccctcgtttgtttgatgcagactgtctattataaatcaaaagggggatttccgaataatgattaggattaatacaactttccaaaagtaggatgtatcatgtttgattcaaactatgaattcgagtaacccaaatgtacatagcaataaatcgagttcgtattcccgcaattaaaacctagtaatttggcatccgaaattgaaattctatagattagccttctagccaaaactgaaaaataaaagaggatgtatcgtaaaaaattcaagagatttacgaaaacatcctcgattcaaagatttcatcattacatgctgttttttgaattccagatgaaatcaacgttaaacccatttgttaataatatgaattttaatgttgtacagtaatatagtgtttcagttctcctctatgggtttgatttccccaagtcaatgctaccaccacatcatacttgcctgctggaatattttttgtcaaaaagctcactttaaaactgcgaatattacggccattaacatatatgtctttgactacatctctttttttattgacaagaagaacattaacaccccagtttacctcatattttgtaggcacagtacctgttacgacaatagaagtagcgtgttttgagtaagtattagcatctgtttggaatttaattgctccttttgaagtcatggctaacgcttctgaactgtttgagaaaatcccgaatgtcaaaagagcaactgtgaatagtgtcattacaatttttttcaattgaaacttcctttctccatttatttagaaatccattcaatatattactaaattttaaaaaaatattcaacagaaaaataggtaaattctactttttattaaatgaagtattactaaagaagcaaaggctaacaaaaccaatttaatcatcacgtttaagattttacaaaaaagctcccagcacttatgtgccgggagcttaaaatgtttataaatttataaagtgtcaggcccttcttcgcccgtacggatgctgattgtattgggaacttcgtaaattaaattttgccgtcaccgggctcacgggttttgagcactttttgcaccgtttcagccacttttttgtttattttccgataaattgctgtgtccagatgtttcctgattctacataaccgacaccgatttgagtgaactcggggttcaagatgttctttctgtggccttcactgttcatccaagctttaacgacagcttcaggagtcggctggcctttggcgatattttcaccggcagttttataagtgattccgaaagacttcatcatatcgaaaggtgaaccgtaagtaggactttggtgatcaaaatagtttttgtctttcatatcttgtgattttgcatgagctgatttgcttagtttatcatcaatctgcagaggttttaagccttgcttttgtctctctgcgtttgtcaattcaacgactttcttttcatacgcactgacagatgaaggagttttctcgctgctgttgtttgtgttatctgtctgttttgcattgtcagccgtctggttttgatcggctttcggtttttcagcagctgccggtgccgtttttgccggtgtttctttttgaacgtctttaactgtcatatcagaattctttgcgtgtttttgcagctgctgtttcagttctttctcatttttaaagctcagctgtttcgcgctctttttcatatgtagtttttcaacagcctcttgaagagtcagatgctgtacagtgtttccttttttcacggtaacgacgtgctggcatgacagctctttggcagatgcctgctgaatgcctccgaatgtaatcaaactgactgccgcggcagcagataagagaaatgcttttttcataagtttatagcctcccagagaagttgtttttttctacatgaaaaatcttatcacagcttttttgtcataatgcaggcagccatttcctttgacaacaaactcttgtcataattgtaattgagcgcagaaaaatggctctataccgggaaaaacgatctgtatttattttttaaaatccgttacatctcttcaaattatttgaagtgttagatatattttaagataatttgatcttgacagttttttttacccgttttcgctgtaacaacttttacaaaaatgttacaattaaaatctgtttatgtaaatatattcaatgatttgagaggtgtaacagaaagtggctgaagttgcgcgtgaaccaaagaaaaaaacgaaacgttacagagcgctgagaatgaatctctattttttagttgttttccttctctttacggcactgatttttaaactcggcatcgtccagattgtcgaaggggataaacaccgccaggatgcggagaaggcaaatgcaaaaaccgcctattatccgacaccgcggggaaagatgtatgacaagcggaacagagtggcggttgataaccaggctgtgcctgaaattgtatacgtttctacctcaaaaacctcggcaaaggacaaattgaaaacggcaaaaaatctcgccgcactgattcatattgatactgaatttatgaaggatcgaaatatcattgattactggcttgccgcacatccgaagaaggcggaaaagcttatgaaggattcagaaaacagcctgaaatcccaagaagtatacaaacgccagattgaacgcgtcccgaagcaggagattgacgcgatcaaacaaaataaaaaagagctggaaatcgcggcgatttatacgcgtttttcaagcggcaacgcctatcagccgcaagtcgtcaaatcaatggacccgaataagctgaacggaaacggaaacagcggttcactgcttgacgagcatgaaaacaacaagcaaaaaccaaaaagcgacctgacatatgaagaagtttccgtggtatccgagcacctgaaagagctccccggcattgacgtgatcaatgactggacgcggaaatatccatacgacaaaacgctgtactctctgttcggcggtgtgacgacaccggaacagggattgttgggcgaacggaaagattattatgtcacaagaggctactcactgaatgaccgggtgggtaaaagctacattgaatatcagtatgaagactatttaaacgcacataaagaaaaagtagagtatgtggaaaacagcaaaggtgaagtcgtcagccaaaagcccgtcgatgaaggcagcagaggctacgatctgcagctctcgctcgatatggaattacagtcgaaagtcgaaaaagtcattgaaaaagagctgagaagaagccgcgccgcaggcaactttatggttgacagaggatttgccgtcatgatggatccgaacaacggggatattctctcaatggcggggaaacgcatcgatctcgaaacaaataaaacacaggattttgcgatcggagcatttacgacccaatatgagatgggctcttctgttaaaggagcgactgttctcgcgggttaccaaagcggcctcccgcattataaaacgtttgtcgatgcaccgcttgtatttaaaggcaaaacgagaaaacaatcgtggacacaaatgggagccattactgagctgaccgcgctgcaaagaagttcaaacgtgtatatgtttcatgtggccatgcatatcgcgggcattacctacgttccgcacggcacgctgccggccggattagacgatattaaaaaaatgcgcaactattacgcccaatttggcttgggtgtgaagaccgggattgatcttccgcaggaatcagcgggcatgcagtcaaatccgcaaatggtcgggggattgctgcttgactttgcgatcggacagtttgatacgtatacgccgcttcaaatggctcaatatatttcagccatcgcaaacggcgggtatcgcgtccagccgcggatcgtcacaagcattcatgaaccggacagcaaaaacaagattggaaaagcgattgaacagcgagatattaaaattttgaacaaagtaaataacagcccaagcgattttgaccaagttcataaaggaatgaagttggtcacaagctcacctcaaggaacggcttattcaacattccagggttccggcgctgatgtttccggaaaaacgggaaccgcgcagacgcgctattacggcacgaacaaaaactggtgggggaaagagacgtataacctgacctttgtcggttactatccgtcagaacatccacgagtggcattcagcgtcgtcgtaccgactgttcaggatgatcacgatcatgtcagcaaaaacattgccaaaggagcagttgacgcttacaaagagcttgaaaagaaatacaataaaaaataacaaatgaaagggcggccgaacatctcgtgcgccctttctttcattcaggaaaattgacgttcacaataagaatagaaggagaatgctcattttttagcgaatcaatctagtggaatttctttttataccagtccgtgtccagcctgcagtgcgagtataatgcaaaggagggattctgtggaacaggatactcagcatgtcaaacagtttcaatcgaaaaccgatcttcatgccgttttgacgtctaacgggcgtattatgtatatttctgcaaactgcaaatcgtacttcagttattctcaggaagaaatgatcggctcatttctcaaaacgttcctgcatgaagaagatcaatttttggttgaaagttacttctataatgagcatcatttgatgccttgcacctttcgccttattaaaaaagatcataccatcgtatggcttgaagcgggtgtggaaattgtcacaccgcaaatggaggggacggatcgggaaatcatcctcaaaatcaaggtgcttgaggagaagacgccccgccggccttatatgtatgaacaaaagaagcaaaaggcagaacaacagtcggaagatgcggctggaaacggcgaattcgagcgtcttgtcgaaatgctgccgaatcctttatatgtcagcatcaacggcacaatcgcctacgccaacaacgcgatgcttgccatgctgggagccgaaagcaaagacgaggtaatcggcaggcgctcttatgagtttattgaagaagagtatcacgacattgtgaaaaaccgaattgtgcggatgcaaaaaggaatggaagtcggaatgatcgaacagacgtggagaaggctcgacggcacgcccgttcatttagaagtaaaggcggcaccgacgacatataaaaatcagcgggcggaattgctgcttctgattgatatttcttcacggaaaaaattccaaacgattctgcaaaaaagcagagagcgttatcagctcctcattcagaattcaattgatacgatcgccgtgattcacaatgataaatgggtattcatgaatgagtcgggcatttcgctgtttgaggctgaaacatatgaagatttaatcgggaaaaacgtctatgatcagcttcatccctgtgatcatgacggcgtgaaacagcggatccaaaatattatcgaccgaaagaccgagtcagaaattattaagcagtcgtggtttacctttaaaaaccggctgatctacacggaaatggtctgcattccgacgacgtttttcggagaaacggccgtgcaggtcattctgcgtgatatttctgagcggaagcagacggaggaattaatgctgaagtcggaaaagctgtctatcgcagggcagctggcggcgggaatcgcccatgaaatccgcaatccgctgacggcgatcaaaggatttttacagctcatgaagccgacgatgggggaaaacgaacattactttgaaattgtgttttctgaactgagcagaatcgaattgattttaagtgagcttttaatgcttgccaaacctcagcaaaacgccgtgaaagagcgtgtaaacttaaagaagattataagtgaagtgaccgctcttttagagacgcaggcgaatcttaaagggatttttatcaaaacggattacgaacatgacagcatgtatattaacggtgatcaaaatcagctgaaacaggtgtttatcaatctgattaaaaatgccgttgagtcgatgccggatgggggaacggttcacatcatcatgacagaagaagagtattccgttaatgtgacggtgaaagacgagggtgacgggataccggaaaacgtgctgaaacgaataggcgaaccgtttctgacaacgaaagaaaaaggaaccggcctggggctgatggtcacattcaaccttattaaaaaccaccagggagctatccaagtagacagcaaaccggatagaggcacggcctttcacattacattcccgaaacaataaaaaacaacggcgttatgccgttgtttaaatagtctgcatggattctctcgtttttaaaataaatgcttccagccggtccaagccttctctcaatgtatccagtgaatatgcgaatgacagcctcacatacccttcacccaactttgaaaacgagctgccgggcacaagagccacacctgcatcctctaaaagagccatactaaaatcaaacgatgacattccgaatgacttaatggaagggaagatataaaatgcgcctgacggctttacgacgtcaagccccattgaaactagacggtcatatacatagtcaagccgctttttatactgttctctcataataagcgcatcatcaacaccgtttgtcaccgcttcaagagccgctttctgagagattgaagacgcgcatgtcacactgtattggtgaacttttaagatgtgcttggcaatttctttcggtgcgaaaatgaaaccgattctccagcccgtcatgctgtgtgattttgacaggccgttgatgacgatcgtctggtctctcaaataagacgcgatcgaataatgcggtctgtcataggttaattcgctgtaaatctcatcagacaggacaaaaacatttctgcccttcaggacggctgcgatgttttgcagctcttcctcagacaatgtcactccggtcgggtttgacggataaggaagaatgacgcattttgtttttggtgtcagcgattcttcaatgagccgcgccgtcagcttaaatccgtgtgtcgtcgtatccacatggaccggaacggcgcccgacatgcggatgatcggttcgtagcccggatatatcggtccggggagaataacttcatcgcccggagataaaatcgtccgcaaagacgcgtcaatcgcttggcttgccccggttgtgacgatgatttcagtttcagcttcataattcaaatcagcttttttcttcatataaagctgtacggcctgtctcagctcaaggccgcccgcattcggagtatatgccgttgcgttctcgtcgattgcctttttggcagccgctttgacatggtgcggcgtgaagaaatccggctgaccgatcgtaagcgaaatgacattgtcgtgctgagctacaagatttgagaatttgcgaattcctgaaatttcaatttcttttacattcggattaagcaaatgttccataattcatcaccttatactatatattgagtttctcctattttaccactagctgagcatttgtcatctttttattgaactatcccgagtatatgtccgatatgtgaaaacataccttctttcagaaaaaaataagacaaccagctgaaatgattgtcttcattgtatcatgatctatctattgtgatatgtggcgaatgtcattaatacccgtattcaaagctgacgtcttcccgccataagatgtatggagcgggcttgtcgggacgctctttcgcctcttttttcatttgcaggtaagccgttttgctgatatcttctaacaccgtcatttgatcttggtcgaatatgactactgtacccatttattacacccttcttcctgaaaaatccttgactattttaccactcgatgtcaaaaagtcaatgggatatcagaaaaaagcatttttttataaagagttcatggccagttggatcgaatacattcactttttccgtttacagccgatatatacagtacaatactgaatgcggatagcgagggattgaattgtctttacaacaatacgatattttattggattcaggcacaaacgaattagaaatcgtcaaatttgaagtaggcgtcaatacatttggcataaatgtgatgaaagtccgggaaatcattcagccggtagatgtcacatctgtgcctcagtctcataaagacgtagaagggatgattaagctgagaggcgaaattcttcccgtcatcagtctgtatacctttttcggcgttgatgccgaaggagcaaaagacgataaatatatcgtaacggaattcaacaagcggaaaatcgtctttcacgtcggttccgtttcacaaatccacagggtgtcctgggaggcgattgaaaagccgacttccttgaatcagggcatggagcggcatttaacgggaatcatcaaactggaagacacgatgatctttctgcctgattatgaaaagatcatttatgatattgaatcggcatccggagttgagacttatcatgtccatcaggaaggatttgatgaaagacgggcgggtaaaaaactgatcatcgttgaagattcgccgcttctgatgcgtcttttgacggatgagctgactgaggcggggtacagtgaaatcgttacgtttgaaaacggaaaagaagcgtatgattacgtcgtggaactgacggataacggagcaaacctgtcagaccatattgacatgattatcagtgacattgaaatgccgaaaatggacgggcatcgtttgacgaagctccttaaggataacccgcaaagctctgatgtgccgattatgattttctcgtccctgattacggacgacctgcgccaccggggcgaagtagtcggagcggatgaacagatcagcaagcctgaaatcagcgagctcattaaaaaagtggatacgtacgtgattgaatagaaaaaagccgatgcatgacgcatcggctttttttgcggcggaattaaaaataactctcaccaagttttttaaatacgggtttatgataagcgggctgctgcctgttggcggcaagcggtttttcctttaagcccacatatttttgcaatacgtttttcgcttttgtcaaagacatttgtgctttaggattgcggtacgattgatttaacgtacctaaatgcggaagatgctggaagtcttcttttgttggaggcatgtgaaaatagtagtctccgatagagataagtacgtctgactgctgttggctaaacctgggattatttgaaaagtgaagccctatttttttccctttgccttctttcacaagcttttgtaatgcccgttttttcagcagataaaggtatttagggttgggggcggtttttgcatggcggttcacagtataaacagcttttgaaagattctcgatggttggctgcagctctttcgaataagcgtggtcgtccattatttctctcctttgcattgatcaagttcatatatagattatacttttttagcgttgaaatgcaaatattgattataaaaatacgcctttttctgatgaaaagggcgcatctttttcctttattatacaggattcgcatgtttttcggaatcagcctttaatgattgctgcacatcgacctctgctgcctcggcgctgtatttcggaagagcgataaaatagaatacaaataccgctaaaatcacgattcccatgccgtaataaaggtaatcaatattggtaacgaatttcggaaataacagggcaaccagtccgagtgtaatcgattgggcaaacatcataaaaggatcctgccagccgctgacccggcccattattttcggatgaacgattttcggcatccagccgccgatggcgatattgacagggccgatgcacatgccgaggacgaaagccgccgcataataaatccacagcttatccgtatagccgaggacaaaaatgagcagtccggctgccaaaataggaatcgacatcaaatgatgcggtttgactttttttgcgatcatcgttccgatcacacttcctgcaagcaggccgaagccgagtgcaacggtaaagatggaagtatgtgattcgtaatgatcaggcgcaagtccgtatttcatcgtaaacatcggcagtacggcaaagccgccgttgacaaaaccaaagataaaaaagccgaaaataagggaagcaagcaatttgtttttaacaatatatacgatcccttccttaaaatcagcgaccgagtctttcagaaacgaatctccccatttaaaagggccgttcggctgacgggcttctttcggaatgcggcacgcgcggatcagaaagcctgatacaataaagctgacaaaatcaaggataatggctccgtgaataccgatcgttttatacataaacgcgcctataccgacgccgaataccatgaagatgctgaacaggatctggttaagtcccgccgctttcgcgtaatgctccttaggcagaatagcttgtacaaggctggcttccgccgggaaaaagaacttggtcacggcgcttctgatgaacaaaatacagaacacgagagggatactcccggtgtataatgcggcaaacaatacgatcgtcagtccggctctgatccagtcacaattctctgcgacctttttcctgtcaagccggtcagctgcgacaccgacaatcagaaatacgaaaactgtcggcagtgaatacatcagctcagccaaagtcgtgtatgccggctggtttgaaaaatggtccagcaagtaaaaagcgaaagccatattacctacagtcgttcccatttgagaagcgagtgctgcgaaaaagagacggacaaaattgcgatttttaaatatatccataaacacgctccttaccctaaaggtcccactgtaatatattatcatcagctcgttccattaacaaataagatctttctatcttataatagtcacccttgttccattaggaacggcagcggcaagttcagtgacgtcctgattatacatccggatgcatccttttgataccgctttgccgatggaggaaggattatttgttccgtgaatgccgtaatgaattttagagaggctgagccaataagcgccgaacgggccgccgggcttaggctggcggttcacgatgtaaaattctccggtcggcgtggtcgtcaatatttttccgactgcgatgggatacgtacggatgagcctgccaaggcggtataactccagtttcttcgctccgatatacacgatgatggagtagggaatggtggatgggtcgggaagattcggtatgataatatgctgtcccgcgtatatgaccgattggattgagggatttgcctgaaggagagcagcagtgcttattctgaagtcttgcgcaatgcttgagatggtttctccttgtttcacttgatatgtcagcagtttcatcaccctcctttttgctcttttccatatacatattacggagggggtgtctgtgcatcaggataaaagtcttatttttgctcggttttcaatgtgaacagcgtgatttccggtctggctaaaaatcgatacggcagtcttgtcgtaccgagcccgcgattgacgtaaacggctgtgtcatgcagtgtatacatgccgtcggtatacgtttttccgtaaggaggcgtaatgagagggccgaaaaacgggagctggacctggccgccgtgagtgtgtcccgacagctggaggtttacgggatatccgcctgtcttaagagcggcatcaggctcgtggacgattaaaatggaaaacgcatcttcggaaaggcgtgacagggtgccttcataatctggttttccgagtattacatcatccaaaaacgcgaattcaatccggcttccgtctgtcagctgcaccttacggtagccgtttcgaagcacttgaaaatcagccgcttccatcagagccttgtacgtgttcgtaccgtagcctccatggtcatggtttccgtaaacacaaagtttgccgaagggagcttcaagattttgcagcacggcgagtgcacgctggtgatcattaaataaatgcggcttatcaattaaatctcccgtaaagatgagcaaatcgggtttcagctgattgatcttttccgctgctttattcaagtcaccggatgtaaacacatcactgagatgcgtatcgctgaattgaacgattttaaaattgtcaaagccgcgggggatcaggcggctggtgattgtatgccgggtgacctcaatcatgcgcggttcaatataccgggcatagccgtaacctccgcaagccattgcgagagctgcacccaaaatgccgaatcctctttttaaaaatgttcttctggtcattttctccatatgtaaaaccaacctttgtcagagttgttctattatatcatcagcctggctgaaaaatcccttctcagcatgtaatgacgcggatagacatctgtgataaaattatgaatgattattcattcaataaaaaggggtgggtttgttatggataagaaagcggtaatcattacaggcggttcaagcggcatgggaaaagcaatggcgaaaaaacaggctgaattaggatggcacgtcatggtgacagggaggaaccatgaagcacttgaggaaacaaaaaaagaaattgagacctttgagggacaggtcgcctgttttcaaatggatgtccgttctgattccgccgcttcagacatgattacagaagcgaaaaaagtctttggccggctcgatgcgctgattaacaatgcggccggcaactttatttgcccggcagagaagctgacgcccaatggatggaaagctgttattgagattgttttaaacggcacatttttctgcagccaagcagcggcaaggcattggatcgagcaggagcagaagggcgtcatcttaaatatggccgctacatacgcatggggagcgggagcgggtgtcgttcattccgctgcagccaaagcgggggtattgtcactgacaagaacgctggccgttgaatgggggagcaaatacggcatccgcacaaacgcgatagccccaggcccgattgaacggacaggcggtgcggagaagctgtttgaatcggaaaaagcggtgtcccgcactatgaacagtgtgccgctcggccggctgggcacaccggaggaaatcgccgcgttggcagcgtttttgctatctgatgaagcgtcctacataaacggggactgtatcacaatggacggggggcaatggctgaatccttatccgttttaatttttcatatattgattattttgcaaaacaagcgaacgttaaagccgccgttcgcttgttttattttctattcaaaattatgatataattttgaaagattaaggggcgattaattgaagaaattatgaaaatggttcgttgtactatttgtaagcagtttcgttatcatctttaatatttggtactttattatttgtgcttttactccggagtattatcaaaataccaatcttacatctgatgaaataatcagatttgaaaagctatttcacatagattttcctgatgaaacgaaatttattaaagccagggagtatttgagtgggctcggaggcgatacatcggctgtattatatgtgtctctgccaaccaagctggcggaacgattttatctgattatacgtatatgccaataaatcatactgatcatgccggttcaatgtatggagttgacgtttccgagagtgttggcgggttaacaactcttacatgtggcactttagataaaaaaggaactttctttcagttgaaacatgatgatgattggatatttaacagcactgattggagccattatttttggacagatgccggttataatgctcttatatttatccttttatttgtgcttgcgaaacaaatgaataacgtccttaattaaccggtctgaagagtgatcttaaaaatgtccccccttttattttaagctgctgccatactgcctccttttcccctaatctaaacatttgtggtgctgatataattgtgtataatcagacaaagatagagaagcaggtgataacatgttggacccacttgatatactgacgaatattgatgatgtcattccgtattaccaagcgatttttaacgctgaggaacaaagagtcgtaggctacgaagtgcttgggcggattttggcagatgcggagattgagagcctcgggccgtttttcttagattccggcattccggaagaatataagcttgaggtcgatgacagagtcatcaggcaggcgctggagcggtttaaagaagctgaccgtgatctgttgatttttatcaatcaggatgcgaatgtattgatgcttgaccacggcgaaagttttcttgagcttttgaaagaatacgaagagcagggcattgaattgaaccgtattgtgcttgagatcaccgagcacaatttcgaaggcgacattgaacagctgtaccatatgcttgcctactatcgtacatacggcattaaaatcgcggtggacaatataggtaaggagagcagcaacctggacagaatcgcgctcctttcaccggaccttctgaaaatagatttgcaggcgctgaaggtatctcagccgtcaccatcatatgagcatgtgctgtacagcatttcattgctggcgagaaaaatcggcgccgcgctgctgtatgaagatatagaagctgatttccagctccagtacgcatggagaaacggaggccgattttttcaaggctattatctgcaggcgccgagtggcgattttatagaccggagcctgttaaaagcacgcttgaaaacggagtttcagcaatttatcacgagagaaaaaaagaagctggaaacggtctatgaacactctgagaatttttataagcgggtcaatcaggcagtttccgagctgaagaaaacccatcaggcggacgatgagtttattaaaaaactggcggaaaacctgaccgactgctgcttcagaatttatatgtgtgatgaagaaggctatcagctgacgggaaatgtgttcaagcagtccggcgaatggctttatcagcctgaatacatggagaaaaactggagctggcgtccgtactttttagaaaacatcatgaagatgcgtaattcaagaaaaggctttttcagtgacctgtacagtgatattgagacaggtgagatgatcagaaccttttcatacccgatggatgacaatatgtatttatttatcgatctgccttactcttatttatatgaacaggacgggttactttaaagcggctgctgtatgccgctttttttgttcatttgaaaaaagttttaaaaaacgattgacaatgatactgataatcattatcatttagttatagagagaagttactctctgttccccaacccctctatcagatcaagatccgaaaaaacttggcgctacccccgccaagtttttttatgctgtctcctcataaaagggcttctccttacatacatctgataaggcggctcaaaaagcgaaaaattatttttgaaaggtgtatgacattccgaaaaaagcttcaaactattcgcaaacacggtttttcccgtttatttctttttgaaaatccagcgggaaaatgccatcccggtctactttatggtatgatgctctgtagaacttgtattataataaatacttgttgatttgaagttgttttttgaaaggagtctttttttagaatgtcacaattaatgggtatcatcacgcggctgcaaagtctgcaagaaacagcggaagcggctaacgagccgatgcagcgttattttgaagttaacggcgaaaaaatttgcagtgttaaatatttcgaaaaaaatcaaacgtttgaactgacggttttccaaaaaggtgaaaaacctaacacatatccgtttgataacattgacatgatttctattgaaatttttgagctccttcagtaatttgatttgatttttcaggctgaccaagcttccggtcttccgcaagcggagctttattaaattatgcaaaggaacgtgcttgttcgtttggttgtagactctggaaagaggagtgtccgtacatggctgattcttttctgttttataatctttctgaggcacagatgacctttcaagacgtgacggagcggctgaaacgctttgtcaataaagacccccgttcagcatacgtgctgtctgtagggactgattcacaagtttaccgcgacttcacaaagtttattacggctatacacttgcaccgtacaggcaagggagcttggggctgtttgaaaaatcacgatcttgcaagaccgatacatagccttcgcgaaaaaatttcgttggaaaccgcgttcagccaggagatggctgcgcatatcctcgacggccgtcttatggaactgacagatttgctcttgccttttgcggatgaaggggcggatctttcatttgaagtgcatctggatatcggtcaaaaagggctgacaaaagaattgatacaagaaatgaccggccgcattacctcgatgggcattgaagcgaaaatcaagcccgattcctgcacagcattcagttatgccaatcgttacacaaaataatatttcatacagaatccgcaaaatgtcgaattatgcggttgacgatttttttctgtttacttattctagcggtagagctgaaagcaaatttcacgttgctttcggaggtattcagttaaaaatagggggcctgattacgtatgagtcttatcggtgaacgatttacggaagaagaacagaaacttctgctgaatatcctgatcaatcaagaatatgccattgagcttttgaccagcgaaatcaacgatatagaagcagggtcaaaaagcgttgatggaaccacttataaaaaactcgtaacgctctatgaccgttttcggaatgaaaattaatcagcggcctataaattgatactcgattgcaaagagtatcttttttattgacggaaacttttcgacaaaaaatgataatgtttatattattgcaatatagggaatacatgctttgatgaaaaatgtaaaggggtcgaagtgacatgattagcttacaatcagatcagcttcttgatgcaacagtcggacaatttatgatcgaggcggataaagtggcgcacgttcaagtcggaaacaaccttgagcatgctctattagtgctgacgaaaaccggctataccgccattcccgtccttgacgcttcgtaccgtctgcacggtttgatcgggacaaatatgattatgaacagcattttcggacttgaacggatcgagtttgagaagctggatcaaattacggttgaggaagtcatgctgaaagacattccccgtctccacatcaatgatccgattatcaaagggttcagcatggtcattaacaacggctttgtctgcgttgaaaatgatgaaggcgtctttgaaggcattttcacgagaagagtcgtattaaagcagttgagcagccatatcagatcattgaataagtaggctcgcacgatcagcctatttgttcttttgcatgccggaaaaagaaaacgcatacatatgagtggcgcttgcctcggcagcctttattttattagaatggtagataagaaatacgaaaaggcattgaaaaggaggacgacatgcagcttcaagagcttcatatgctcgtagttttagctgaggaattaaacatgaggaaggctgccgaacggttattcgtgtcacagccggctctgtcccagcgattgcagaccattgaaaaagcctggggaacaaagatctttcttaggtctcaaaaaggacttacggtaacgccggcaggagaaaaaatcatacaatttgcaaatgacgtcacggatcggcaagaaagaatcagagaaaacattgatgaacttgagggtgagattcacggcacattaaagcttgccgtcgcctcgattatcgggcagcactggcttccgaaagtgttaaaaacatatgtggaacgatatccgaatgcaaaggtctctctcattacagggtggagcagcgaaatgctgaaaagtctgtatgaagatcaggtacatatcggcattatccggggaaatccggaatggaaaggccggaaagattatttaatgaccgatcatttatatttggtcgatacggaaatttcctgtattgatgatattgcccataccgaccggccgttcatccaattcaaaagtgacagtacatattttcaggaaattcagcattggtggcatcaaaaattcaaaacctcgccgaaacagaccatccttgtcgatcagattgaaacgtgcaagcagatggcgctgcacgggatcggatatgccattctgccgtcagtcaccttagaagaggaagacaaagtaaataaaatgcctctgcttgatacaaaggaccatccgatcggccgtgacacatggctgctcggttatgagccggcatttgaattaaaacaggtgcaggcttttgtttctgtcattaaagatatgctgaagcaggaacgcccattttagaaagacagcaatcatgctgtctttttttattttttattgacaatgaaaatcattatcatttaaagtgttatatatgttaatgaaaatcattatcaattacgaggtggtcatatgcagaaagcattaatgatatacgcaagcatgtcggggaatacagaggatattgccggcattataaaagaaacactgagcgggcatcagatagcagttgactgtcttgacatggacgaagcagatgcggattctctcgaagcatatgattatgtttttgtcggcacgtacacatggggggacggtgatcttccttacgaagcggaagatttttacgaagatattctgcacagccagctcaacggactgaaaacggcctgtttcggttcaggcgatcacgcctacccgaagttttgcgaagcggtcacgctgttttgcgatgcgtttgaacaggccggagccaatttatatccggaaacgctgaaaattgagctggcgcccgagacggctgaggatcaggaatgctgcaaagaatttgtccgcggttttcttgcatgggccgctcaccacggagacaagtgccatgtttcataaaggcgcgacggctgtgatggcatcagtatcttcgggattttttgtggctgtgaaaggcgaaggtatttttcatttttcggcggaagaaggctggaaaagactgttccgagtgaaaagcagaattcatgtgctgacttacatagggccctacatattcgcggctggagaaaaaggcgccgtcctcagatcagccgatcagggaaagacctggacggcctcccggtttccgaccagcgcctccgtatgggccgttgccgggcggaatgacgggtttgtctgtgcgcacggcacatactgcctctacttatctgatgatttcggcgtcacttggcatgtggctaagcccttttcacaattaaaggagccgcctgtcatccgttcgctttgtttacacggtcagacgatttatatcggcacccggattcacatgaatcatggcggcatttgggcgtatgatctgacggaagaccgcatccggcgtataagccgcgaaaggcagcgcatgacggcttcaatgaggatgtatcagaatgactggctcattgcagcaaagggcgcggcaaagggagaacggggggaggttgccgtccgaaacgtgcggacgcaagaggagtttgccattacagccggacccgccgtacgggaaaaatcatttctcgacgtttctgaggataacgggattatttatgtcacatcgtcacaggacgaaaacggattttcgcgtatttatcaagctgatctcgccgccggtgaattaaagtggtttgatacgatccgcggtcacggatggcgggtggccaaccgggaagaaaactttttttgcgcgggcctttacgaaagtaagtttgtcagaccgtatgaagcggttcggctcgcacattagtttttatgcataaaggagagacgaagatggggaatgtattgcttgtttacgctacaatgtcaggaaacaccgaggcgatggcggatttaattgaaaaagggctgatcgaagcacaagcatccgtagacagatatgaagcgatggatattcatgccgaactttttaatgattacgagtatattttattaggcacatatacgtggggagacggggatcttcctgatgaaatgctcgatattgctgaagatatggaaaacctggagtttacgggaaaaacatttgctttgttcggttccggagatacgtcctatgagtttttttgcggggcggttgacgaattggaaaaagtaatcacggcccgcggcgggcgggtggtgctgccgtcggtcaaaattgaaaacaaccctgagggcagtgaggaagaagagctccgggaattcggaagacagtttgccgcgctgtgcagccagccggcagaataaaggcttgttcctttttttcttgtctttgtatccttcctttgttacagtaatgaggtagaaaatcagaggaggacaatacatatgaaaatgatggatgcaaatgaaattatttcatttattcaaaatagtacaaaatcaacgcctgtaaaagtgtatgtaaaaggcgatcttgaaggaatcagctttggcgattccgctaaaacattcctgaacggccaatccggcgtcgtttttggcgagtgggctgaaattaaaagcgcaattgaagaaaacaaagacaaaattgaggattacgtcattgaaaatgaccgccgcaactctgcgatcccgatgcttgatttaaaagatgttaaagcgagaatcgagcccggcgctattatccgcgaccaagtcgaaatcggcgacaatgccgttatcatgatgggggcatctattaatatcggttcagtcatcggcgaaggtacgatgattgatatgaacgttgttctcggcggacgcgcgactgtcggcaaaaactgccacatcggagcgggttctgtattagcgggcgttattgagccgcctagcgctaagcctgttgtcgtggaagacgacgttgtgatcggcgcaaatgcggttgtgcttgaaggcgtaacaatcggtaaaggcgcggttgtcgctgccggagccatcgttgtaaatgacgtcgagccatataccgttgtagcgggaacacctgcgaaaaaaatcaaagatatcgatgaaaaaacaaaaggcaaaacagaaatcaaacaggaattacgccagctgtaaggaatggtttgatagaatgggcgtggatgataaaatccacgccttattcttatctcaaggaggaatacatatggaaaaagagcggctcattgccatccgaagagatctgcaccgcattccggagatcggctttcaggaatataaaactcaacagtacctgctgaatctattgaaccaatatccggaggaaagaattgaaattgaaacttggagaaccggcatctttgtcaaagtcaacggcacggctccggaaaaaatgctcgcctacagagcggatatagacgctctgtcgattgaagagcagacggggcttccgtttgcatctgaacaccccggttttatgcacgcatgcggccacgatatgcacatgaccatcgcgctcggcattattgatcattttgtccatcatcccgtcaaacatgatctgctctttttattccagccggctgaagaaggaccgggcggagcggaaccgatgcttgaaagcgatgtgctgaaaaaatggacgccggatttgattaccgctctccatatagcacctgagcttcctgtaggcacaatctccaccaaaagcggcttgctgtttgccaatacgagcgaactcgtcatcgatctcgaggggaaaggcgggcatgcggcatatccgcatacagcagacgacatggtcgttgccgcgagcacgcttgtcacgcagctgcagacggtcatatccagaaatacggatccgcttgacagcgctgtgatcactgtcggaacgattaccgggggcacggcgcaaaatatcatcgcagagcatgctcatctggagggaaccatccggacgctttccgaggaatcaatgcgtatggtgaaaaagcggattgaagagcttgtcaaaggaattgaaatcggcttccgatgcaaaggaaaagtcacgtatccgtccgtttatcatcaagtttataatacaagcggcctgaccgaagaatttatgcaatttgtcagcgatcatcagcttgctgacgtgagaacggcgaaagaagcgatgaccggagaagatttcggatatatgctgaaaaaatatcccggctttatgttctggctgggggccgattcatcccacgggcttcatcacgccaagctgaacccggatgaagatgcgatggaaaccgcggtaaatgtcatggtcggatatttttcgaagtatgccaattaaatccgaaaagaagaataatctaacaaaaattgagcattctacataacggaggtgttcaatatgacgaaaaaaattggaattgaacaatctttatcggatgtagaacaggcgttaaaacaaaaaggatatgacgtagtgatgatgaagactcctgaggatgcgaagaattgtgactgctgtgtcgtaaccggacttgacagcaatgtccaaggaattgccgatacgtcaactcaggctcccgtcattacggcttccggaatgaccgccgacgaaatctgcagcgaagtggaaaaaaaatttcattaaaaagaaaaaaccgaagcttacgcttcggtttttctattcggcggaagcggcgtttttaaaacggtcgagcgcgatttttatttctctccgcagtacgcgttcaacccgccattgctccatattttctgttttggcaatgattctgattaccatttctgacgtgcttaaatcctgaaccccgatgacgtccggcccttccttaatctgcgggagctcagcggctgctttgtcacacgcggtttgcaggatttgaatggtttcatcaagatttttttcaagcggcactttaatatcgacaagcgcctgcatcgttccgcgggaatggttgctcacattcgtaatgccccggttgggaagatagtgaagcgtgccgtcaaagctccggatttgcgtcgtacggagaccgacctgctcgacaatgccgctgtagccggcaaccgtaatataatcgccgacgtcgatctgtttttccaaaaggataaaaaatccggtgacgatgtcactgacaagcccctgagccccgaagccgactgcgagaccgaccacgccggctccggcaatgagagcgctcggattgtagtgaaataaatccaaaatcatcacgataaaaacgaaaatcaggatgtatccatatacattaagcgcgaggcttcgcaaagtataagcgcggcctgtggagaggttgttttgttgctcgaatttctgaaacagatgcttgatcagcttttttcctgccgcccggaaaataaagtacgctaaaataatgagagccagctttatgatgaaaatcccggcagatgtgagaagcccggcccagtcaaagtgttttaaatcaatcatagtgatgtcttcctttcaagtcttttgcggaaaaagctaaaagtgatatacccgtttttaaaaaaaataaaccttttaatagaaaccagttatttcatttatgatttgttcatattgcccggtttcaatatcatcatttttgtgaagatatgaactaaggaatcgccacactcattttaacatggtgattcagccaaatcatatcctttggagggaaaacaggggaatgttgcccggcgaaactgaaagccccggcaaaaaacctttttcataaggagggaaataagatgaaattacgtcagcaaatgcctgaattgacaggcgctaaagcatggattaacagagaagtcacgaaggaacagctggtcggcggaaagccggcactgattcacttctggtccgccagctgccgcatgtgtaaagaagcgatgcctgagatgaacgaatttcgtgataaatataaagatcagctgaatgtgatggccgttcacatgccccgttccgaagacgatcttgaccttgagaaaatcaaggaaacagcggctgaacacgatatctctcagccgatttacgtcgacagcgatcatacgctgactgaagcatttgaaaatgaatatgtgccggcttattaccttttcgataaaaccggacagctctgccattttcaagcgggaggaagcgggatgaaaatgcttgaaaaacgcgttagccgagtactttcagaaacggagcaggcttctgagtaatcgggacaatctccgtcggactattgtctcggttctgcaaaccctttgccgtttaggtaacagggtttttttgtgcctattggataaaaaattccaatatgacatgtgcggcttgaaaaataagagaaacagccgtaaacacgctgtaccgcttgttttatcgatatcattatcttttacatattatagtcgaaaattgtagatatcacgctaattttcattaaacaagtaatttcaagttatattttgaaatggttgaataaattggtactttgtccagaatcccctatatgacaagggatttttgtatataaagtaccattttcagaaaataagcaatttttcatagagtaaataaaatagtaaaatgataaaataatagttgataaaattacttttgtaatctaatatcttaataaaagcgtttaaatttttgacagggggttttacacatgtttaatgaaagagaagcgctgcgcttacgtttagagcaattgaacgaagcagaggtaaaagtcattcgtgaatatcaaatagaacgtgataaaatatatgcaaaactgagagaattagacaatacaggcagcctgtccgatacaaaaaaagagtttcgtccggagaaaaaaagtgactctctcccggtgcttgcagagcttgcagcacaggaaatgagaagctatcaaaagccgcaggcacagcctcaatcctcccagccgcagatgcagtctattacgtctcttcccgccggcattccagacggttctacaagaagaagaagagggacggcgagaccgggatcaaaagcggcaaaactgcgcgaagcagcgattaaaacattgaaacgccacaatgcagcgatcaaaagttccgaacttcaaaaggaaattgaaaaggaaagcggccttgaaattcctaatatgacaacatttatgcaaagcttaattaaaatgtatccggaagtgaaaaaaccataccgcggccaatatattcttgagggagaaatttctcaggaaacagcagaaacggcaaatgatacggctgctgaataataaaacagtaaaaactgcttgcgttactcaagcagtttttttgcgttttcccgcttattctgcggaagtgacgcctcttttccaggctttttttcaagcttgacgacatatttttggaaaggcttttcgccgtcagcacgttctttcaacgcatccagtttttcatcaaacgactgatcgcgtgactctgattgtacaaattgtttttgcagggagatgacttgttcggtaacggctttaagcaagtcttctgcctgaacagtctctttggaaacagaagggatttccagagcttgttccgccggttccgccgtgcggctgtcaatatcagcaaaatggccggcaatccaagcatcactttcgtccagctgccgtttatacgaaagaatggtttcttgaaataacttttctttcgttttttctatttctacaagccgttcttttgtttctagtattcgatctctcatatgattaatttctattttaatatgtttgagctggtattctttttctatcatttgtgtttgaagccgggtattttcgtctgcagcggcatgataacgctgtttcatatcttcgtgagaagtccgttcagtttgaatggcggtctcaagtgagcggatgcgggtatgtaagtttttattttcttcttcaaattttacatttgtaagatgcagacggtgcttttcttccatctcatttttccgccgaaacgtttcctgctgaagcagttcttgcaaaatgacgattttatcgagcagcccggctctgatttcatgcaaagaacgttccgtgtcacttgtctgtttgtgtttttgagccatggcttccaattcgtcagaaagcttgtgaagccgctctttaatattggcgttttcctcctgaagcttattatttttttgatggaagtagcttgcttcaaattctgaaattaattttctgcatctggaaagttcggatttcaagtaaaggttctcttgagaagtgtcgtggaaaaacggaccggatattttcataagaaccatctccctcatgatgttaacactacaatatgggaaaggatcaacggctattcctcttaattaaacagacaagcaccgtaatattgtatttcggctgaggcgtttgctatgcttttatatagaatgggagagagatgacatgaaacgggtgaatgtaatattagcggggggagcttcccgaagattcggagaaccgaaagcttttgcaaagtggaagggcggcatgttttatgaacaggcgaaaaaagccttcggcggcggagaaacggtaattatcagccgccctgagcatataaaaaagttcttatcaaacagggagcggcatgttttggccgatgagccgcggtttcgggcaatgggcccgcttgccggcatctatacggcaatgaaacaaacggaaggcgaaatatatacggtcatatcctgtgacacgccgctcgtgacaagaaaaacgatggctgcgcttgaaatgaagctgaccggaaacctggacgctgtcataccggtttgtgaaaacagagagcagcccctcttggcggtttaccataaacgggtgcaggatgtgctttttgatcagctgacacaaaacaaactgaaaatgacagacacgctgaaacggctgtctgtctgttatgtgcaggctgaagacatcggcgccgggccggaggagttcgctaatatcaacacacaggacgattacaccagacttttggcgcatgtcgagtcttcaaatcaagactgatcgggaagaaacatggtatgatggaaataaaaatgcaaggggacaacacagatggaagagcgctattcgcgtcagacaagatttaagccgataggggaaaaagggcagcaggcgctggctgacagcagtgtcctgattgtcggagccggagccctcggaacagccgcggcagagggcctggcaagagccggagcgggccgtatggcgattattgaccgggattatgtggaatggagcaatttacaaagacagcagctgtatacagaagaagacgcgagacagcgcctgccgaaagcaatggcggctaaggcgcgtcttttggcggtaaacagtgatatacatatcgatgcttacgcggcggaaggtacggcggaaacgctcgaaccgctgatcgaacaagcggattgcatcgtggatgcgacagataattttgaaacgagaatggtcatcaatgatctggcgctgaaaacgaaaacaccttggatttacggtgcctgtgtcagcagtcagggaatgtgcatgacgattattccgggggttacgccgtgtttatcctgcctgtttgagcaaatgcccgtgggcggagcgacatgtgatacagcaggtatcatacctccggcggttcatatcgtttccgcttatcagcaggctgaggcgctgaaattgctgacaggaaatcatgcagcggtaaatcggcgctttttcacgtttgacgtgtggaataacaccaatatgagcataaatgtggatcagatcaaacgggatcattgcccttcctgcggcgcggagcccgtatatccgtatctgcagcctgaaaacaggccgaaagcaagcgtgctgtgcggaagagacaccgttcaaatcagatcggaagccttaaagaggctggataaagaagaacttgtcaaacgtctgaagcagatcggtaaagtggaagcaaatgaatttctgctgcacatggcgtatgagcgcttcaggatcgttatttttcaggacggacgggctttgattcacggtacaaacgatataaaagaagcaaattcagttctggccagggtgatcggcctgtaggaaggggagatattgctatgcttgaaaaaagaacgccgattcaggtggacgaagcagtccgccgggtgagccggtataaaaaacagggggataccgaatgggtggcgcttgaggacagtctccaccgctatttggcggaggatgttaaggcggatcatgatgtgccggcctttaaccgttccccgtatgacgggtttgccatcagggcgagcgattcaaaaacggcttcccgtgacaatgccgtcacctttgaagtcattgaccatatcggagcaggcgccgtgtcggaaaaagaactcgggccttatgaagcggtccgcattatgacgggggcgcagattccaaaaggcgcggatgccgtagtgatgcttgagctgacaagaacgttttctgaaaacgggacgaattacatgtcagtgaaacgccctttccatgcgggcgataatatttcatatcaaggagaagatgcgaaaaagggcagctcgctattaaaaaaagggacgaaaatcacgccgggcgtaaccgctcttttagcaaccttcggctatgcttccgttcccgtggtcagaaagccggttgtcggcattatcgcaacggggaccgagcttcttcatgtcagcgatccgcttgagccggggaaaatccgcaacagcaacgctgcgatggtgtatgcccaggtcattgaagcgggtgcagtaccgctgaacttagggaaaatttccgatgattttgatgacagctatgatgcggtgaaggaagctatgaaaaaagttgattttctgatcacgaccggcggcgtgtcagtcggcgattttgattttcttccagacatttataataagctcggagcggaagttctttttaacaaagtggcaatgcgcccggggagcgtgacaactgtcgcccgggccgatgacatgctgctgttcggcctttcaggcaatccgtccgcatgttatgtcggattcaccctgtttgtcaaaccgatgattcagacgtggcttctgaatgaaaaacctcattccggatgggcggaagccgtgttaataaacgactttccgaaaccgaatccgtttacgagatttgtgagggcgtttgtttatcataaggacggaaagatgatggcgtcaccggtcggcctcgacaaatcaagctcagtcacatctctagccgaagcaaacgcgtttatccttctgccgggaggaacgaggggatatgaagcgggccggacggttcacgcgctcctcatccgtgatgagaatggaagtgaatggccgtggtcaattctttcccgatcgtccagatcgtaggttttcaaaacagcggtaaaacaacgtttattgaacgtgtgctgaaagcggcgccgaaagagtgcgatattggatgtttaaaacatcacggacatggcggagagccggaacctttttctgacggaaaagactcggagcgtttttcaaaagccggagccgcggttacggcagtagaaggggacggcgtcctgcagcttacggcgcgaaaaaaatgggatctggcgggtttgatcagtctgtatgaatgtctgggaattgacggtcttctcatagagggatttaaacatgcgccgcatccgaaaatcattatgatcaaagacagcgaagattggcaaaagctgaagcatttggagcgcgtgatcgcggttgtcagcagaaatacggagcatatgccggcagatgccggcatgcccgtattccatgcggacgatccggctgccatgatgtttgtgctttcgcagctgaaaggggaatctgcataaatggaacgttttcaaattacaagggaacctatcattgccgaaaatatcgtaaaaaaagttgaaaagcgtgaagccggcgccatcacaacgtttatcggcacggtcagagagtggactgccggacggcggacggtgcgtctcgaatatgaagcgtatgaaccgatggctgttcaaatgctttctcaaatcggcgatgaaatcagcgcgaaatgggaaggagccgaagctgcaatcactcaccgtgtcggcgtccttgatatcggagaagcagcggtcgtaatcgccgtgtcttctccgcacagaaaggcggcatatgaggcgaatgaatatgcaattgaacggataaaacagattgtgccgatatggaaaaaagaaatctgggaagacggagaagaatggataggcgatcagctggaaacaacgccctatccgaacggaaaaccggatttgcataaaggggaatcgcgatgattaaagtattattgtttgccgggcttgcggagcaggcgggaacaccggtcattgaacttgacgaaaaagagacggcggcgtctgctgtaaaaacgctgctaaaggaacggtacggccttcagacgattgacaatgccatgatcgcaatcaatgaaacatatgtaaaagacaacagcatcgtaacagaaggtgataccattgcctttatccctcctgtaagcggagggtgaaaaaagagccggatgtgcatcattgccatccggcttttttgtatataggcgctgaattccagagaatatctaaatgggatttaaagggatttgcgattgggctggttttgactgcatgaataggctgaagacagtgccttcacaaggctttgagcctcccgtcgcacggatctgacaatgcttttttttacataattatggaacgtaaagctgagaatttgtgttacaatttagcataaatacgcaaacggcaaaaaaattgaaacttctctcagcctaaagcgtacgtataaacagaataatacataggaggcatcagcaatatggaaccaaacctggaaaaaggcaatacggcagtaacggaaaagccgtcaattttcggcgtcattacaagtcctgttgtgcagtttaaaagattaaaagaaaagccggtcatcggcattcctctcctgattgtcatcattctcatcgcggccggcagtattttgcgcggactggggatgaattatgaagaagtgctgaacagcccatctcttgacggtttgacggatgatcagattgaaatgaccaaaaccttcgctaaattcggctcgatgttcggaggaatcttcgggggcattatcgctctgtttatcgttccgctcatttactggctgtgcgtcaaaatttcaggcggcgtgacaacttacaaaaaaatgctctcactcagcctgtttacggcatttattaccaatatcggcttagttattaacggtcttgttacttattttaccggtgcgggctcattgtacgccgtaacatctttggcgagtgtcataccggccggagacggcgtcgcggtctttttaagcgcgttcgacattttcagcatctggagctatattctgctcgctttgggacttcgctatacaggcggcatttcgaaaaaagcggcctggacttccgcgattgtcctgtttgttattatgcttttggtttcggcagtcggaggactgttaagttcagtgacagcaggtgtataacatgaaaaaaatttggatcggaatcggcatcgccgtaattgttgcagtattcatcggtatcaatatttataagtctgccgctcccgcgggcggaagcgccgggaaaaaaatcgaaaccggaaccatggaaaacagagaaatctcctctacggttatggttccgggaacacttaaattctctaaagaacagtatgttttttatgaagcggataaaggaactcttgataaagtgaaagtaaaagaaggcgacaaagtaaaaaaagggtcgtcgttagtcacgtatacaaatgagcagctcaatcttgataaagaacaaaatgagttgacagaacaatcaaaacggatgcaaatcgaacaagttgaagaaaaactcagagcattaaacagcaaggaacaagatctggcaaaacaagtgggggaagcggaagccaaaaaacaaattgaatccgaacggactgatctgcagcttcagcaaaaaacggcggaaatcgaattaaagcaatctgatttgcaaaagcagtctcttgaaaatcaggtggcgaatctcaatgttaagagtgagatggacgggacggttatctcggtaaatcaagaagcggcttctaaaaaatcggatattcaagaaccggttatacatataggagacccggaacacctgatcgttgccggcaatttgtccgaatacgacacgctgaaagtgaaaaagggacaaagcgttacaattacctcagacgccattccaggtaaaacgtggaaagggagagtggcggctgtcggcctcgttcctgatcaaaagtcaagcgctgcttcgggggaaagtacggaacaggccgtgcagtatccgttccaggttaagctgatcggaaaccttccggagggcaagccggggtttaaattaattatgaacattgaaacagacaaacggaaagccgatacgctgccgtcctccgcggtcaaaaaagacggagatgagcactgggtctttacggtaaaagacgggaaggccaaacgcgtgaaagttaaagtcggcgataccgcaaatcagcttacggagataaaagaagggctttcaaaggatgataaagtcattctgaatccggctgacggtttgactgacggaacggatgtgaaagcatagatgattcagctttcaaaggtgaaaaaaagctatcagatcggcaaggagacgtttgatgttctccgttcaatcgacttgacgattgaagaaggagaatatgtgtcaattatgggaccgtcgggatcgggaaaatctacgatcatgaatatcatcggctgtctggacagaccgacgtccggcagttacaggcttgcgggcgaagatgtttcttcatgcaccgaaaaagagcttgcggcggtccggaacaaatcaatcggatttgtctttcagcaatttcagctgctgccgcgattgaatgcaagaaaaaatgtcgaactccccatgatctacgccggtatcggcaaaaaagagcgtgaggaacgggctgagcatgcgctggaaaaagtcggtttggcggatcggatgcgtcacatgccgaatgagctgtccggcggtcagaagcagcgtgtcgcgattgcaagagccattgtgaacgaaccgaagctcattttagctgatgaaccgaccggcgcgctggatacgaaaacaagcatttccattatggagcagttcacagagcttaatgcagagggcgtgaccgtggtgcttgtgactcatgagcctgaagtggcggactgtacaaacagagtgattttcgtccgtgacggcatgatcgtttcccgcgatgctgagcagaggagagtgggggaatgagcctgtcagaaaatctccggatggccctcagttccgtaagagctcacaagctgagatcgattctgacaatgctcggaatcattatcggcgtcggttcagtaatcgttgttgtggctgtcggccagggcggagagcaaatgctgaagcaatccatcagcgggccgggcaatacgattgaattgttttacatgcccagtgatgaagaattaacagccaatccgaacgccttacaggaagcgagttttacagaagaagatattaatggattaaaaggagtggacggcgtaaagcaggttgtcgcttccgcggtaaaatccatgacggcccgttaccatgaagaagacacggatattacgctgaacggcattaacagcggctacatggacgtaaaaaagctggacgttcaagatggacggacatttacggacaatgattttctttccgggaaaagagcaggaatcatctcgaaaaaaatggctgaaaagctgttcgggaaaacgtctccgctcggaaaaatcgtctgggccggcggacagcccgtagaagtaatcggcgtactgaaagaagagagcggttttttatcgttaggactcagtgaaatgtatgtgccgttcaacatgctgaaaacgtctttcggtactaacgactacagcaacgtttccgttcagacggagtccgctgatcaaatcaaatcaacaggaaaagaagcggcccgtctcttaaatgacaatcacggtacaaaagaggcctatcaagtcatgaatatggaagaaatcgcggcgggaatcggccaggtcacgaccgtcatgacgacgatcatcggttcgatcgccggtatttctctcgttgtcggcgggatcggggtcatgaatattatgctcgtatcagtgacagaacggacaagagaaatcggcatccgcaaatcgctcggtgccacgagaggacagattctgacacaattcttaattgaatctgttgtgcttacattaatcggcggcttaatcggaatatgtctcggctacgggggagcatcactcgtttcccttatcgcaggctggccgtcgctcgtttcctggcaggtggtttgtatcggtgtgctgttcagtatgctgatcggtgtcattttcggcatgctgcccgccaacaaagcatcacgcttagatccgattgaagcgttacggtatgaataatcggcgccccatgcagtctgcatggggttttttgtgttttaatgattgaatgaatataatagacttttttcatttatgataaaaagaaaatgtcatacaattgtccccctttttgtcgaatttacagtttacaaaccctatgtacatacgttaatatgaacaaatgtgaaagattttgatagttattgaatgaatttgagtgattttagttgctagaagtaaaaaaagcgtttacaattatcttgcagccgaaatgaatacgtttccaaaggaggcggaatatgctcactcctgaaaggtatcagctgattatggatcagattgaaaagcgtgatgtggtgaagattcaagagctgataagtatgacaaatgcttctgaatcaacgatcagaagagatttatcaacacttgaagagcgcggatttttaaagcgcgttcacggcggggcgtctaaactttccaacagcaggcaagaacccgatatgcttgaaaaatcctccaaaaaccttcaagataaactgaagatcgcagaagaagcggcatctttattagaagaaggtgactgtatttatcttgatgcgggaacaactacattgcacatgattgattttatagatccatctaaggacattgtggttgtcacaaacggagttatgcatatcgacgctttaataaggaaagggatccccttttatcttctcggaggatatgtgaagcatagaacaggtgcgatgatcggcggcgcctcattaacggcggtcagccagtaccgttttgacaaaagcttcctcggggtgaacggcgtgcacattgaagccggctttacaacacccgatccggatgaggctcttctgaagacaaaggctgtgagacaggcgaaaaatgcgtatgttttagccgatccttctaaattcggcgagatttctttcgcagcgttcgccgccttgagcgatgccgctatcattaccactgaagctgaagaacttgcattcgataattaccaagaaaaaactgtcgtaaaggtagtgaaaccatgatttacactgtaaccctcaatccgtctgttgactatatcgttcacgttgaagattttgccgtaggcggtttaaaccgttccagctatgacacgaagtatcccggcggaaaaggcatcaacgtttcgagattactgaaaagacaccatgtgccatcaaaagcattggggtttgtcggcggatttaccggaaattatatcacgtcatttttgcagcaggaaggtctggaaacggctttttctgaggtggatgaagacacgcgtataaatgtaaaactgaaaacgggcgatgaaacggaaattaacggacagggcccgacgatttcagacgaagtgttcaatgcctttttagaacagttctccgctctggaagagggagacatcgtcgttttagcgggaagcattccttcttccctgccgcataacacgtatgaaaaaattgctgaggcatgcagaaaacagaatgcccgggtagtcgtggacatctccggtgaagcgctgatgaaagcgacagaaatgaaaccgtttttgatgaagccgaatcatcatgagcttggggaaatgttcaatacggtcattgattcagccgaagctgccgttccttacggtaaaaaattgattgaacaaggcgctgaacatgcgattgtttcgatggctggtgacggtgcgcttttatttacgaaagaggcggttttcctcgccaatgttcctaaaggaaagcttgtcaattcggtaggcgcgggtgattccgtcgtcgcgggattccttgcgggaatttcaaaacagctgcctttggaagatgcgttccgtttaggagttgcttccggaagcgcaacggcattttctgaagaactcggaactgaagagtttgtacagcagcttcttcctgaagttaaagtcacacgtctatagaggaggaaagaaaagtgaagataactgagctgttaacaagagatacaattcatctcaatatagaaagcaaagagaaagaaaacgttatcaatgaaatggtgacagtgcttgacaaagccggcagattaaatgacagagaggcttacaaagcagccattttaaatcgtgaaagccaaagctcgacgggaatcggcgaaggcattgccattcctcatgcgaagacggcgagcgtcattaacccggccatcgcattcggccgttcaaaagatggtgtggattatgaatcattagacggtcagccggcacacctggtctttatgattgcggcaaccgaaggagcgaataatacgcaccttgaggcattatcaagactttcaacgcttctcatgcgtgaggaaatccgcaaacagcttcttgaagctgaatcagaagatgcgatcattgacatcatcaatcagcatgacaaagatgacgatgaggaagaagaagagcaggaagaacaggcagcgccgtcaggaaaaggcaaaatccttgccgttacggcatgtccgacaggtatcgcccatacgttcatggcagctgacgcactgaaggaaaaagcgaaagagctcggcgttgacattaaagtcgagacaaacggctcaagcggtatcaaacataagctgacggctcaagaaattgaagacgcgcctgcgatcatcgtggcggctgataaacaggttgaaatggaacgctttaaaggcaaacatgttcttcaagtgcctgtaacggccggtatcagacgtcctcaggaactgattgaaaaagccgttaaccaagatgcgccgatttacgagggcagcggcggaggatcttccgcttcaaatgaagacggcccgaaacagaaatcaggcacaagcatcggaagtactttctataaacacttaatgagcggtgtcagcaacatgctgccatttgtcgtcggcggcggaattctcgttgcgatttcattcttctggggaattcattcagctgatccgaaagacccgacatacaacacgtttgccgcagcgctgaactttatcggcggcgataatgcgttaaagctgattgttgcagttcttgccggattcatcgcaatgagtattgcggaccgtccgggatttgcgccgggtatggtcggcggatttatggctacgcaggcgaatgccggattcttgggcggactgattgccggattcttagcaggttatgtcgtagtccttttgaaaaagctgtttgtctttattcctcagactcttgacggattaaaacctgtattgatttatccgctgctcggtatttttatcaccggtgtcctgatgcaatttgtcataaacacacctgtcgcagcgttcatgaatttcttaacaaattggcttgaaagccttggaactggaaaccttgttttaatgggtattattttaggcggtatgatggctatcgacatgggcggcccgctcaataaagcggcgttcactttcggtatcgcgatgatcgatgccggaaactatgcgccgcatgcggccatcatggcgggcggaatggctccgccgcttggaatcgcactggcgacaacattctttaaacacaaattctctaaacgtgaccgtgaagccggtattacgtgctacttcatgggagcagctttcgttacagaaggcgccatcccgtttgcagcggctgatccgcttcgcgtcatccctgcagccgttgtcggttctgcggtagcgggcggactgacagagtttttccgggtaacgcttcctgcaccgcacggaggaatattcgttgcattcattacgaaccatccgctgctttacttaatgagcatcgtgatcggagcgattgtaacggcggttatcttgggaatcgtcaaaaaaccggttgcagagaaataagcaaaaagcgtccattacgggcgcttttttcaatcatgtgcgcatagaagcgttatgtattttatgatgagttatgataaagtaaagatggtacatgaaccgaaacagtgatcgtctaggaggaaccacgttgactgaagaacaaaaacctacttctgaaaaatcggtaaaaagaaaatccaacacatattgggaatggggaaaggccatcattatagcggttgcacttgcgctgttaatccgccatttcctgtttgaaccgtacttagtggaaggatcatcaatgtacccgacattacatgacggtgaaaggctgtttgtcaacaaaagcgtcaattatatcggagaaatcgagcggggagacatcgtcattattaacggcgatacgtcgaaagtccattatgtaaagcggctcatcggaaaacctggagaaacggtggaaatgaaaaatgacacgctttatataaacggcaaaaaaatcgcagaaccgtacctcgcgagcaataaaaaagaagcgaaaaaactgggagtcaacctgacgggagatttcggccccgtaaaggttccgaaaggcaaatacttcgtcatgggcgacaatcggctgaattcaatggacagccggaacggactcggtttaattgccgaaaaccgaatcgtcggcacctcgaagtttgtgttcttcccgtttcatgatatgcgtcagacaaaataaaaacgccgcgctgcccgatttggacagcaggcgttttttatttggcaaacgaggcggcgacggcgatgaacaataccgtggccagcactgatccgacaatggccagaacgctgaaaaaaagattcacctgcttcttctctttgccgcgtttttcaagcatccgttttgaaaagagatgcgaaaacgtataaatgagggcgattccgacgtacaagccgatgtcacgtgccgtaaagcctgtgacggccagaaaaaccccggtgaagaaaatcataagacagtattctgtgagtgttaaaagcttcaacttgttcctccgtgatgaatatgtatatatatctattgtatcacagcgctccgggtttgacgcctgcatctttcaaacccgtatattcgcagggaaacatttctcttcccctttattcatggtatacttttaatgatgatagacacgatggaggattctaaatgattgctgtaaataatgtgagcttgcgttttgcggatcgcaagttatttgaagatgtcaatattaaatttacgccgggcaactgctacggattaataggcgcaaacggtgccggaaaatcaacatttttgaaaattttatccggtgagctggagccgcagaccggcgatgtccatatgagcccgggcgaacgtcttgccattctgaagcagaaccactttgaatatgaagacttcgaagtgctgaaagtcgttattatgggacataaacgtttatacgaagtcatgcaggaaaaagacgcgatttatatgaagcctgatttttcagatgaagacggcatccgcgccgctgagcttgaaggagagtttgcggaattaaacggatgggaagctgaaagtgaagccgctattttgttaaagggcctgggcatctctgaagacctgcatacgaagaaaatggcggacttaggcggttcagaaaaggtgaaagtgcttttggcgcaggcgctgttcggcaagccggacgttctgttgcttgatgaaccgaccaaccacttggatctgaaagcgattcagtggctggaagagtttttaatcaactttgagaacacagtcatcgtcgtatcccatgaccgtcactttttaaataaagtgtgcacgcacatcgccgatcttgattttaataaaattcaagtgtacgtcggcaactatgatttctggtatgaatccagccagcttgctttaaagctttctcaggaagccaacaagaaaaaagaagagcagattaaacagcttcaggagttcgtggccagattcagcgccaacgcctctaaatcaaagcaggcgacatcaagaaagaaactccttgataaaatcacgcttgatgatatcaaaccgtcatcacgccgttatccttatgtcaatttcacgccggaacgtgagatcggaaatgacgtgctgcgggttgaaggcttaacaaaaacgattgacggggttaaggtgcttgataacgtcagctttattatgaacagagaagataaaatcgcttttacgggacgcaacgaacttgccgttacgacattgtttaaaatcatttccggggaaatggaagctgacagcggcacatttaaatggggcgtgaccacttctcaggcgtacttccctaaagacaacagcgaatattttgacggcagcgacgcgaaccttgttgactggctccgccaatactcgccgcatgaccaaagtgaaagctttctgcgcggtttcttaggacgcatgctgttctcgggagaagaagtcaacaaaaaatcaaacgtcctttccggaggagaaaaagtgcgctgcatgctttcaaaagcgatgctttccggcgcgaacattttaattctggatgaacctacaaaccacttagatttggaatccattacggcgcttaacaacggcttaatcagctttaaaggcgctatgctgttttcatctcatgaccatcagtttgtacagacaattgccaaccgcatcattgaattaacgcctaaaggcattgttgacaaacaaatgtcttatgacgaatttcttgaaaacgcggatgtacagaaaaaacttgaagagctatacgcgtaataaagaagcaggggagactctgcttttttatttatgaaaaaagttttcaatcttctgacttcccgttacaataaatgaatacataacttgaaaagagacggaggaatgcatcatgaagtttttagttgtcggagctggaggagtgggcggatatatcggcgcgcgtcttgcagaaaagggaaatgacgtgacgtttctcgtccgcaagaaacgggcggaacaattacaagagacgggattgaccgtcaaaagtgaaaaaggtgatgtttcaatcaagccgaaattaatcatggcgggcgaagaaggagcatttgacgcggttatcatcgcttcaaaagcgtattctttgcaggacgtcattcgggatgtcaaaccgtttgtcaaaccttcgtcggtcattattccttttttaaatggatacaggcactataaccagctgtttgaagctttttcaaaacggcaggtgctgggcggcctctgctttattgagagcgcccttaacgacaaaggggacattcttcatacgagcgctgcccaccgctttgttttcggtgaatggagcggggaacgcacggaacgtatgaatgagctggaaaacgcatttgcaggtgtgaaagcggatgtcatcatcagccgggatattgaaaaggacatttggaaaaaatatatgtttattgccgcgcaggcgggagtgaccactctgtttcaacagccggtcggaccgattttagaaacagaaggcggccgcaacacggcaaagcgcctctttgctgaaatcggcgccattttcaaggctgccggcatcccgaaagatcctggtctggaagaagagagttatcgcacattgacaagcatgtcttaccatatgaaatcgtcgatgctgagagatatggaaaagggcagggtgacggaaggtgatcatttacacggatttttgcttgagaaagcgaaaggcttgtcagttgatgcacctgttttggaaaccgtctgcgccaacttgcaaatgtatgaagcgaaataaaaaaaggaggcctaagcgcctcctttttttattaaaatgcccagtttccgtttctgaagatcggttctcttttgccgtccgcagtaatgccgtcgatattcatgtctttggaaccgaccataaaatctacgtgtgtaatgctttcatttaagccctctttgacaagctcttcccgtgtcatttgtttgccgccctcaatattaaaggcatacgcactgccgatcgccaagtggttagaggcgttttcatcgtacagtgtgttgtaaaataaaatatttgattgtgaaatcggtgaatcgtacggcactaaggccacttcaccgagatagtgtgagccttcatcggtttcgacgatgccttttaaaatctcctcgcctttttcagctttcacatcaacaatgcggccgttttcaaaggtaagagtgaagttatcaataatgttgccgccgtagctcagcggtttcgtgctggaaaccgtgccgttcaccccgtcacgctgcgggagggtgaaaacctcttctgtcggcatgttggccatgaattcgtgcccgctctcattcacgcttcccgcgcctgcccatacatgttttttcggcagttcaatggttaagtctgttccttcagcctgataatgcagggcgctgtaatgttttttgtttaagtgttccactttttcatgaaggttttgatcatgttttttccatgcttccacagggttttcttcatttacgcgggtcgttttgaaaatttcttcccataaaagctgaacggctgtttcttccggctgatccgggaacacttttttcgcccagcctgttgaagccgctccgatcaccgtccagctgaccttatctgattgaatatattgtctgtatgtatgcaatgcttttccggcggctttttggaacgctgcaatccgtttgccgtcagtgccttttaacaggtcggggtcggatgagacgacagaaataaacgcagccccttttttcgcgagctcttcttttccttttgcttcccattcaggatactcttcaaacgcttcaaaaggtgccatctcgtattttaatctggacagttcatcgtcctgccaatttacggtgacgtttttagcgcctttttcataagaatgtttggcaagcagtctgacaagttcccgaacatcagttgaggcattgattacgacgtgctgtcctttttggacattgacgccgacttctaccgccagctgagcatatgtatgtaacttttcagtaaacgaactcatcgttcattcctcctcatcggtttttctcatcatatcaaatatcgcctcataaaggaaagaaaggagcacaaacgaaaaagacacagcttttgctgcgtctttacgggtgattcagttttacggcgccgccggccggagaatggggcatattggccagtgatatgctcataccccccaaaataattccgcttaaaatgacggctactgctacgcgtcttcccacatctctaagcatatgcttcctccttaatgtttctccagttctcacaatatgagccggccggagaaaaaagaagcacaatcttattatttaatcgctttttgcagcttgtcgatgacgtctaatgaacgtcccgtgccgatagccactgattcaagcggatttgccgccaaatgaacgggaacgacgatttcatctgtcagccattctttcatcccgtttaaaagggagcctccgccggttaacacgacgccgcggtcaacgatatcaccgctgagctccggcggacaatcttcaagtgtcgctctgatcgcttcaagaatatgcaggagcgactcacgcatcgcgtgctgaatttcattagattgcagtctgattgtcttcggcagaccggttacaaggtcacgcccgcggatttccatcgtttccggcacatgttcgatcaatgcaaaaccgatttccattttcacttgttctgccgtacgttccccgatcagcaggttgtatttttttctgacgaacgaggcgatatcttcatcaagctggtcgccgccgattctgatcgaatggcaggatacgacgcccccgaatgagatgatggcgacttcagtcgtaccgccgccgatatctacgacgacgtttgcgaccggctcgtcaacagggaggtcggccccgattgcagcggctacgggttcttcaatcaagtgaacgtttttcgctccgcagtttttgacagcgtcactgatggcgcgtcgttcaacggctgttgagcctgaaggcgtgcagacgacgacattcggtttgcggaaagtcattccgattttttttccggcttttttcataatgtgttttaataagtcagttgtcatatcataatcagcaatgacaccgtctttcatcggccgaacggcgacgattttccccggcgtctttccgatcatgcttttggcatccgttccgatggcaagcaccgctttcgttgttgtatctacagcgacaacggaaggctcgtttaaaataattcctttatttttactgtaaacaagtatattagcggttcctaagtcgattccgatctcagttgattgaaacatgttttcacccaatccctatcctgatttaattgattctacatttaaagtttctgagaaaaaccatgatttttgggggtttccgccgggaatgaaatgtttttgtaaaaaaggagggaaagtctgtatcccatatttcaaaaggattttcttttgtaaaaaaacattcagttccggatgctgagaaacttttgctccgttcctttcgtctacgtttatgaaggattttccttggacataaagaagagacattaaaggaagtaggggatttctatgaaatcaattggtgtagtaagaaaagtagacgaactcgggcgtattgtcatgccgatcgaattgagaagagcattggatatcgctattaaagatagtattgaatttttcgttgacggagacaaaattgtcttgaaaaaatacaagccgcacggcatttgcttaatgacgggggaaattactcccgaaaatcaggagtacggcaacggcaaaattattttaagtcctgaaggagcgaaaatgctgcttgaggaaatcgaggaagcgttaaaagatagatcataatcagcaaaaagggcggagcatcattccgtccttttattatgaacttgtgcaaaaactcacgggaaaagtaagcgaacctgctcaattaattgggaatagttatcattttttagtcaataatgcagtcaacaatgttacaatatatgtagaaatgctagcggcaggtgggactatgggaaaatatcaagcgcgtatcatttccttaatcttggcaatgatttttattatgttttgggattatttattttatatgattgaacggaatccgattaactggcccgttgacatcacctttaccgccgtcacattaatcagcgtctggctgctggcttattatgtggataataaaaagcagctgctggcggagctgaaggacagcgagcagaaagcaaaggcgctttcagatgagaaaaaccggatcatggacaatctgcaggaaatcgtttttcagacggatgcacaagggaatattacatatttgaatcaggcctggacggcgattacgggccactccatcagcgaatgtatgggcacgatgtataatgattattttataaaagaaaaacatatcattgattatattatctcccaaatcaagcagcagtccccgtcaggaatgtttacggccaaatatattaaaagagacggctcgatcttttggggagaagtccattataagctgtattatgaccgcagacagaaatttgtcggaagcctggggacgatgtctgatatcagtgaacggaaaaaagcggtcgacgagcttctggaaacgaacgaacgccttgccatgcaatctcaaaagctggccattgccggggagcttgcggcaggaatcgcccatgaagtaagaaatcctttaacgtctgtcagcggctttctccagctgatgaaagcccagtatccggaaagaacggattattttgatatcattttttcggagattaaaaggattgatctcgtgctgggggagctgcttctgctcgccaagccgcagaccgtgacgtttaccgctcatcatctcaaccatattttacggcaggtggcgacgcttcttgacacgaacgcggtgctgtcgaacactgtaattgagaaggatttcaggcagactgagtcctgtatggtcaacggtgacgaaaaccagctgaaacaggtatttatcaatattattaaaaatgcgattgaagcgatgcctgacggcgggaatattcatatttatacaaaacgggatgaagaatacgcggtgatcagcatacaggatgaaggaaacggcatgtcgaaagaaaagcttgaaaacatcgggaaaccgtttttctcaacaaaagatcaaggaacgggtctcgggcttccgatttgtttacgaattctgaaggagcataatggtaaacttaacattaagagcaaaaatggagaaggcagtacgtttcaggtgattctgccgttagaagcggctgctgtccaaaaggaggaaaaataacttgcttctttttgtatacggtttgttacggaagcgtgaagaaaaccatgaactgctgaaaggcgctccgtgtgtgtgcgagcaggctgcgataaacggcgtgctgtacgaaacggataaaggtcagcctgcggcgtctttagcagaaacagcttttgtgtacggggaattgtatgaaacagatcatcagatgatccgtaagctggatgcgtattatgctgattttgatcgaaaagaggttgccgtgacgacggatgccgggaataaaaccgccttcgcatatgtcgtaaagcccgaccagtgtgcttcattcagccgtatcaaaagcggagactggaaagaataccgttttatgaaacgggaggatgacagtccggtttattatttcgcttacggctcctgtatggacaatgcccggtttaaacaggcgggggtcgaccacttttttgccgagccggtcggaggggcggttgttgaagggtattcgacgagattcacattaaggcgtcctgacggttccagagccgatcttgttgaagacgggggacgaactgaaggcgtgctgtacaagctcccgtttgaagcggcaacctatctgtacaaaagagaaggtgttgataaccacacataccgtcccgcgttcatagaagtgtgtgccggcggccgtgtatacagaggcgtcctgacgtttctcgttcttgataaagctgaggaaattgcgcctccgggtcactatcaggaagaaatcgaacgcggagcggatctgtatttatcgcccgccttttcagaaaagcttaaacgctatatgaactcattgccgaaaatgtgatactattcctattagagatattgtttaaaggagtactgttatgagaaaagagtttgccgttatcggtctcggacgcttcggcggaagtatttgcaaagcattaagtgaagaaggccttgaggtcatggcgatggatattgatgaagataaagtaaatgaatacgccaaaatcgcatcacacgcggtcatcggcgattcaaccgatgaatcggtgctgaaaaacttagggctgcgcaactttgaccacgtcattgtggcaatcggcgaaaatatacaggcgagcattttaacgacgctgatcttaaaggaactcggcgtgaacacgatcacggttaaagcgcagaacgattatcatgagaaagtgcttgcgaaaatcggggccgatcacatcgtccaccctgaacgtgacatggcaaaacgcatcgcccacaacatcgtatcaaataatgtgcttgattatttggagctgtccgacgaacacagcattgtggagatcgtggccaacagcaggcttgcgggcaacacactgcttgatctggacatccgggcgaagtacggcattaatatcgtggccatcaagagagaaaaagaagtgatcgtatctcccctggcgactgaaatgatccaaaaagaagatattctcatcgttatcggctctcttacggacatttcccgatttgaaaaaagagtgcttcacacaaagtgaaaagccgtccgtaaaaggacggtcttttattatgtcagaatagaaagacattatcgtgtaagcggtattttctgcaatttttattgactatgatcaggcgatccgatagcatattgtaccatatacagaaaaagaggaggcctcattttgaacaaagaaacactggctgaacggctgaatgcatcagccggcagacaaaaagccgataccgtcattaaaaacggaaaaatcatggatgtatttaaccaggaatggatttctgcagatatcgccattacgggcggagtgatcgtcgggctgggcgaatatgaaggggaagaagtcattgatgcagaaggtcaaatgatcgttccgggctttattgacggacatgttcatatcgagtcctctatggttactccgattgaatttgctaaagccgtcctcccacacggagtgactactgtcattactgatcctcacgaaattgcgaacgtttccggagcaaaaggcatttcttttatgatagagcaggcgaaaaaggcgccgctgaacatccgtttcatgcttccttcctgtgttcccgccgctagctttgaacgctcaggagccgtattaaaagccgaggatttaaagcctttttatcaggagaaagaggtgctcggacttgcggaagtaatggattatgtgtctgttgcggaaggtgaagaggatatgcttcagaaactgcttgatgccaagcgtcacggaaaacggatcgacgggcatttagccggactgtcttcagatatcatcaatatatacagaaccgcaatggtgtcaaatgatcatgaagtgacgacaaaagaagaagcgctggacagaatcagacggggaatgtatgtcatgctgcgcgaaggatcggtggcaaaaaatacgctcaatgtgctgccggcggtgaatgaaaaaaacgcgcggcgctttttcttttgcacggatgataagcatgtagatgatctgctttcagaaggaagtgtgaaccaccaagtcaaaatggcgataaaggcgggacttgatccattccttgcgtatcagctcgccagtttaaatgcggctgagtgctacggccttgaaacaaaaggggcggtagcgccgggttttgacgcagatctgctgtttatttcagatgtacgggaggctgccgtcacgaagaccatggtcgccggccggaccgttgccgagaacggacgcacggtttataaacagtctgccggttcctattcgccggaccaggcgctgttggatacagtgcggctgaaagcgccgctgactgaatcggattttcatataccgattcaagaaggcaagaaaatgtatgtaatcgaaatgataccgaatcatttggagacgagaaaaaaagaagtgcctgcaccgtctgctgacgcgttttgtcctgatacagaaaatgatttattaaaaatcgccgtcgcagagcggcacagcggcgaaaaaatgataggactcgggattgtacaagggttcgggttaaaagaaggcgccatcgccacaaccatttctcacgattcccataatatcatcgccgtcggtacaaacgatgccgatttggcaaaagcaatcaacaggctccgtgacaccggaggaggattaacagccgtgaaaaacggagaattgcttcattccgttccgcttccgatcgccgggcttttgtctgataagtcggcggaatgggtcaatgacagcttgggcgtgcttcatgaaaagcttcctctgctcggattcaccggtgatttcaatccgtttctcacattatcgtttttagcgcttccggtgattccggatattaaaatgacagcagccggtctgtttgatgtcaaagcctttcagcatattccgctgcaataaaaaaactgcactcgtaatgagtgcagttttttttttagacctccataatgatcggaaggatcatcgggcggcgttttgttttttcgtataggaacggagcaagcgtatcggtaatttcgtttttaatttcggaccactgcgttgttttccgatccattactttctccagatggttcgaaatcagctgctgcgcgtcattgatcaaatcaccggattctctcatgtatacaaaacctcttgagattaaatcaggccccgccgaaaccttaaagtcgtccatattgatgctgacaacaacgataacaaggccttcttctgaaagaatgcggcggtcgcggagcacgatattgccgatatcaccgattccgcttccgtcaatgtaaacggagccggacggaattttgcctgccacagcggcttcttcgcctttgagggccagcacttcgccattatccatgataaagcagttttcttcaggtatgccgcaatcagtcgcaagtttgacgtgcattttctgcattctgtactcaccgtgaatcggcataaagaacttcggtttgatcaggcggagcattaatttctgctcttcctgtccgccgtgtccggatgtatgaatgtcattcaatgaaccgtgaatgacttctgcgcccgcacggtacagctggttgatggtgcggcttacgctgattgtgtttccgggaatcggagaggaagaaaagacgaccgtatctccgggattaatggaaatctgccggtgcgtcccgttagcgatgcgtgataacgccgccatcggttcaccttggcttcccgtacataaaattgttactttattggcaggcaaacgattgatttcgttatgctcaataaacgtatttttaggacaggtaatgtagccgagattttgtccgatttcaatagccgattccatactgcgtccgaatacggcaacttttctgccttttaaaacggctgcttcaatcacctgctgaagacggtgtatattcgaagcgaatgtcgcaaatataattctgccgtccacttttcggaaaatatcgtgaatgctttcgcctacgcggcgttctgacatggtgaaatcaggaacctcactgtttgtactgtcagaaagcaggcacaaaacgccttctttcccgatttcagccatctttgtcaagtttgccggttcgcctaccggtgtgaaatcgaacttaaagtccccggtatgtacgatattgcccggcggtgttttgacgacgattccgtatgaatccggaatgctgtgtgtcgttctgaagaaggatacagacgtcttgcggaacttcacgatgtcgtcttcaccgatgatgtttaatttggtctgtcttaacagcccgtgctcttcaagtttattccgaagtaagccgatcgcgagtttaccgccgtaaacgggaatatttacttgtctgagcaggtacggaataccgccgatatggtcttcgtgaccgtgggtgataaacagacctttaattttatcttcattttttactaaatacgtgtaatcggggattacgtaatcaatgccgagaagttcatcttccgggaacttgattcccgcatcaatcagtacaatttcatcctgaaactgcaccccgtacgtattttttccgatctcgcccaatccgccgagggcgaaaacggcagtctggtcattttttacaaatttcattccgctcataactccaatactttaaaattttcgctctgcttctcatattctaaaaaagcaccgtccacaggctgaacaaattcaatgttgtatttctgatctttcagtttcgttctgacgtcccgttctgaaacgccctcaatgtaaagtgaatctgttttttcccgaacaggtacttcgtcagccttctcttgataaaataccttataaatcatccaaatctctccttaaatgccgtatgttagactcgcttattctattatattcgaaaacggattataaggaaagtctcgagcaaaaaagggactttcaaaaaccgaaagatcccttctacgcgatgacttttttccggagcattccgccccactgtcttctgagtttcttccgtaatcggcgcagcatcgtatacctcctttaaagccctttatagcagtagtatgcggaaaaaatgaatttgttttcgtgggtaaaactggaatttcatcaaggcggttttccggaagaaaaactttctgtatgatgatattgaaaaagacacgactgataaacgggaaaaaggagaaattgacatgaaaccaaaattgatcttttttgatattgacggcacgatctatgaccatgataaacatattcccgatagcgcaagaaacgccgtgaaggcgcttaaagaggctggccatcacgtttttatcgccagcggaaggtccccgtttatggtaaaaccgattctggaagagctggagattgaatcatttatttcatacaacggccagtatgtcgtttttgaaggtgtggtcatttataaaaatccgcttcctgaagatgcggttgcgcgtttattaaagcaggcggcagaaggggagcaccccgtcgtatttatggcggaagacacgatgaaaacgaccgtccccggacatccgcacgtctcggaaggaatcggcagtctgaaagcgccttatcccgaagttgatgaaactttttataaaggaaaagaaatttatcagctgcttttattctgccgcggacatgaagaaaaagcatatgccgcttttccggagtttgattatgtccgctggcatgaattgtcaacggatgtgcttccgaaaggcggttcaaaagcggaaggcattaaaagagtgcttgagcggcttccgtacggcgtaagtgacacttatgcattcggcgacggactaaatgatcttgagatgatccgttttgtcggcaccggggtggcgatgggaaatgcggttccggaattaaaagctgccgccgatttcgtcacaaagccggtggatgaagagggaatcagctgggccgtcaaagaactgggccttttgaaataaagaaaaccggcactttgggaagtgccggttatttttaacggtcaatggcaatggcgttttcaggttctttgaacggattttctttatcaatatggtcgtaaaacatcacgccgttcagatgatcgatttcgtgttgaaacacaatggccggaaaacctttgaggcggatgtcaatctgttctccttcaagcgtcaccgcctttacgcggatgcgggcgtagcgcggcacatagccgggaatgggttcgtctaccgacaggcagccttctccgctcgtcaagtagcttttttccactgagtggctgacgatcttagggttaaaaagagcatagctgtataaagtgcctttcgcatcttctgcatggacggcgatcatccgtttttttacgtctgtttggggagcggcaagaccgacgcccggacgaagcttgtatttctcggctaattcaggattttggctgtttttcacaaactcaatcatatcagcaagatgctgtttttcttcgtcagaagcgggaagctgaacctcttcagcgatctctctgagcgcgggatgtccgtcgcgtacaatattttccatagtaatcaagaaacttcactcctaaagcttaatatgtaaattatagcgaatttctttatcgcggcgcaacgaaacaattggccggccatagcaggccggccgatgttcatggtgtataatgtcagcagccgcagcctaaataagcggcaccgacgatgattaataagataaacaatacgacgattaatgcgaatgtgcggccgtatccgccgccgcagccgtaaccgtaaccgccgccataaccatatccgccgccgcaacaaccgccgccaaatccgccgccaaatccatatccgtacataaaaaaacctcctcttttaattacgctgaccctctgtcagcagggccggcgtctactataaactatgtaaaagccaaaaagatgtatggtcatccgccctgttttctcaattttttacgcaagtattctttgaaagcaccgtaagcgtctttacacggtcatgccaattacagctcagctattgtcaaaaagcgttcgggcttctatagtggaaattgtcaagattgggggattttaagtgaatatgattcaaaaaaaggtattagcaggaatcggagcgctcggcgccgcaagtatgctgcttgccggctgcgggggaaaagatccggttgaatcgcttcatgactcgatggaaaaagccgttcaagcggaaaaaccgtttcaaaaagagcagaaaacattagaaaaattggagaaaaaagagcataagctatacgacagcgcggttaaactgaatatggatgattaccagaaaattgtcacactgtctgatcaggctctgagcaatgcaaatcagcgaaaaaaacatctgaaagcagaaaaagacagtattgatgattcaaaaaaagcgtttgaatccgcaaaaaaaacttctcaagaaataaaggataagaaagtaaaagaaaaagccgggcatgctgtcgctttaatggagaaaaggtatgcatcttatgatcttttgtacaaaaagtacgaaaaagccatttcacttgataaggacctttataaactgattaaagataaaaagctcacattagcgcagctggaagagcaaatcagcaaagtaaactcagtttacgaaaaggtgcataaacaagcagatgagttcaatcaatttactaaagactacaacaaagagaaagaactattattccgcaaatagtatagtgaaggcatatcggcatgggctgatgaactgataacaaccgagttcagccgcctgtaaaaaggcggctgaagaattggtatatacgtgtgtttcccattgacaacaagtaaatcatggtatagtatttatttagggaaatattcacataaaaccaatcgttgtttcggcacgttggaatgtttttattatattgatatatataaaacagaatgaaaatgtgattttaattatcagaaaattctatctatttatatttacggcgatatgatatttgtacatgctttttgcttttaaacctttatccggcataaaggtttttttattttgcttcgtaatgcttattaagtaagagtgctgagagtaaacgacaattttaaaattgaagtggaaaacgttaatcaaaatcggaacgaaaagaaacggcagaaatacggaacaggaggaaaacaaaatgcttgcttacgtctttcccggacagggagcgcagtttaaaggaatgggcagagacttattcgatgaattcagtgagctcattaaaaaggcagatcatattttaggatactccataaaggatttatgcctttcagatgaaaaagagaggctgactgatacgaagtatacacagcctgcaatttatacagtgagcgcactgcaatatttaaagggtttaaaagaaggtcatacacgccctgatgctgttgcaggacatagtcttggtgaatatactgcgctttttgcggccggcgtttttaattttgaaacaggtctccggctggttgctaaaagaggcgagttaatgagtgaggcttccgagggcggaatggctgccgtgatcggactggatgagcatcacataaaaaaaatacttcaaaagtatgaattcggccaaatagatatcgccaattacaatacatcttcacaaattgtgatagcaggggctgcagaagagataaagcgggcagcctctttttttgaaaaagaaggggcgaaagcttatatcgtattgcaagtcggcggagcttttcattctcgtttcatggaaagtgcacagcgtgaatttgcggaatttatcgaggagtttcatttttctgaattgaatttcccagtcatttctaactatacggcaagaccttataaacaagaagatatcaaacggaatttaattgaacaaataacaaactcggtaaaatggactgaaagcatcaggtatctaatgggacaaggcgtaactgtgtttgaagagatcggtcctggaaacattctgactaaattaattcaaaccatacaaagagatgaggaaccgcttactatcagtgcgccggaagacagtctctttttttctgaagggaacaaggacaattcggaaagcgggaaagagcatagcctcttggccgaaaatatagagagcggtgcagcttcaccggtgtcccgattgggtgatcaatctttcaaagaagattacggtttgacatacgcgtatttggcaggtgcgatgcatagagggatttcttccgctgaaatgctgatccgcctcgggaagaaaggaatgctggggttctttggcacagcgggtttacctataagggaaattgaacaggcccttatttctattaagaagacactcaaaaatggccagccctacggaatgaatctgcgatttgagccggatcatcaagatagagaaaaggaattgatagatttatatatcaagcatgacgtacgagtaatagaagcgtcttcgtatttttccgtcagcgcaccattaatttattacaaagcgcatcagttgaagatagacaaaagcggcacggtcatacctcataatcggatcattgccaaagtttcacggccggaagttgcggccgcatttctgagtccgcctcctcaaagtatcgtaaagagaatgtgtcagcacggtatgctgacggaagagcaggcggagtggctcagccgtattccggcagcagacgatatcattattgaagcagattgcggaagtaatactgaacagggctcattgacagcgatgctgccgttttttgttaacctgcgggatgaaatgatggaaacacacaaatacgcaaggaagataagggtcggggctgcgggaggaatcggaactcccgagtctgccgcgtctgcttttttaatgggcgctgattttattatgacgggatccattaatcaatgtacagttgaagccgaaacaagcggttttgttaaagaaatgctgagtgagacaggaatatgcgatactgcttatgcgccttcggagactctgtttgagttcggaacaaaagttcaggtgctgaaaaagggcacgctgtttccggtcagggcaaataaattattccaaatctaccaacaatatgagtctttgagtgagatagatgaaaagacaaagattcagctcgaaaatgattattttaacaagacttttgatgaaatctacgaaagcttaatagaaaaacagccgaacctcgcccaaaaagctgagcgcaatcaaaaatataagatgctgttactatttaagtggtatttgcagagaggatgtctgcttgctttggaagggcaggaagaacaaaaggtgaatttccaagttcattgcggcccgtctttaggcgcttttaatcattgggtaaagggcacggatttggaatcatggagaaacagacatgtcgatgacattggtgaaaaattgatgaatgagaccgaaagtctgctaaggcacagattggatacgttatttctacactaaagaaggggcgggtggaggccaatggttcatttgaataaacagagtgcggatatcgcgataatcggggttgcttgcagattccccgatgcagatcattatcatgaattctgggaaaacataaatagcggcaaagattccatccgggaagtgccgattgaacggtgggatcccgatctttattattcagctgatatcagtataccgaacaaaacaatcagcaagtggggaggttttattcataaagctgaccatttcgaccataagttttttaatatctctccccgggaagcgaaaaacatggatcctgagcaaagaatccttttagaagaaacttggcggtgcatcgaagattcaggggtttctttgcaggatctccagtgtaaaaccacttctgtttttgcgggtattatgaattctgactaccggcagacaggtcatgctgaatcggaaatcgacagttatgcctgtttaggaagtttcgaagctatgctttccaaccggctttcatacacattcggtttgaccggaaaaagcatgtctgtaaatgccgcttgtgcatcatcgcttgttgctttacatgaagcggttaagtcattgcggacaaaagaaagcgattatgcaatcgcatcgggagtaaacttgaatttccaacccggaaaatatatttctttttccaaagccagaatgctgagtcctgacggcaaatgtaaaacctttgacgcagcggcgaacgggtacgttcccggagaaggggcaggcgttgtattgctgcagcgccttggtgatgcagtaaaagccggtcaccatatatacgggatcataaaagggacagctgttaatcatggcggtaaaacccgttccataaccgctcccagagcagaagcgcagtgccgggtcatctcagaagctttacacaacgctgctgtcgatgctgcgacggtttcttatgtagaagcacatggcacaggtacatctctgggcgatccgatagaaatagaagcattgacaaaagcgtatcggcaatatactgaggatactcaatattgcaggatcggaagtgtgaaaacaaatatcggtcatacagaagcagcggcgggaatggccggattgataaaagttctaatgatgatgaaacaccggagggtgccgaaaagcctgaatgtacatacggtaaacccaattatacagtttgaaaaaacaccgtttaggccggcgcttgattcaagtgattggaaggcggcagacggggctccgctcagggcgggaatcagctccttcggttttgggggtgtcaactctcacgtcatcatcgaagaatttatacatacaaaagacgaatctgacaggaaaggaagggtacccttccttttttccgctaaaagtgaagaaagcatgaaacaaatgatacatcattggagaacctttgctgacgattctgaggaattttgcaaaatatcaaatgaagtgatcagcagcacccttttaacggggaggacatcgtttgattacagggctggtttattggcaggcagcaaggaggaatttaaaaatcagcttaaagagggattgagttttcggaggaaacaagattctgaatgggcgcttgccatcggtgacttcaaatgggaaagttataaacaatttgccgttttgaaacgggtgttccctgatttagaaaagaacgtaaggccggtgctgaagggtataccaaaattgcacagttcatttaaaagaaaatggacacctgagaaaatccgcttgtattctttagttatcaatacggaaatcataaaaagtatcctggcatccggttttaagccaagcctcattacaggcgccggagacggatattacgtcgctcttgcagcagcggatatcatcaaaattgaaaaggccatttctgtaatcacaggcgctgaaaaaccttcgcatttatcctgtgagccgccttccatgccatttgtcaatccgtacacttcaaaaacgtacccgccggttcgattaaatgaagaatatgtaaggatgctgctgaacggtctgagcttcccggctgattttgcagaccgcctgtacgggaaaacacggctgcttcttgagcaccaatatacgtttaaagggtttttagaagagtgggataaagcgggaaagactcaggaaatcgagattttatcttatattgtgaatcgcacggcggataaaagaaacgcattgccggctgatgaggaagcggcgatcatggctatccttgcctctatgagaagactgtataagagatgggatttaacagattatgatggattctttaataatgattatgtactggaaatattaaatttactggatgaaggaatcttgtctaaagaactttttctgagcatgttattgaaaaagcaagacggaattaaacaggctgttgcttgtattaatgagcagccggcaggtttttatgataaaactcgttttccgttgatgacagaatacaatcaaatggatgccgtgtctcaggagatagctgaccatatgccgcttcacacggaagaaaagggaacggagccggatgtgaatatttctgatttttcagtttttcaattcggatcgctccctccatcagcaaaactaaacaaagcggctgcttttgaagcggacaaaccagccgatgaggctctatatcattcatttatgcaaatgtggctttcaggagaagagattgaatgggcgaaactaggtgattatcataaaagaaaagcaccgcttccgccttatccgtttgagcgctctcaattttctttaaaccctcagccggtaaaatcagacgcggctttttcagaaaagaagaatcaggcactttatacgccggtatggaaagaaaccgcacttgagaatgaagcgggcagccgacaagcctgtactattttgttgttctccgggaataaagactattttgaagagctgaaaaaaagagagaatacgtccgcatatcttattatgcccggtgagcgtttagagcagataagcgacagtgttttcacgatcaacaggcagcgtcccgaagattatcaaggtgtcattcgtctgttaaaggaaaaaggcgcagcgcccgatgcaattttgcatacgtggtctgaaaaacagcctgaactggaagaaacactcgaatcaggaatttattccgtgttttatctgactaaggctttaatcagcgagaaccttataaacaaagtaacgttcatttatacattcagcgcagatcaaaaagaaaaattgccgtattttgaaggtgtgaacggttttttaaaatcggtaaaacaagaatatccgcagctgcattgtaaggcggtttgctttgaacatgattctgcatccgtttcattttcagaaagggctgacattctttataaagaaataaacacagcgcctgatcggcatattcatatcacttacagaggctgcgtaagatatgcacggatgttagtgaagcagagagaaacaaacagaaagaccgttcaataccctgaaaaagataaagtatatttaattacaggaggattcggggggattggcagtaaagtcgctgaatattgcgcgaaaactgaaagatccaccattatcctatcagggcgatctgttttaaacgaagataagcagaaacatttagaatacctgaacagctttaaagccaaggtttattatatacaggcgaatatatccgataaagaagcggtaaaaaaaatgattgacggtattaccgatcagcatgcaggtcttcatggcgtcattcattgtgcaggcgttatcagagactcgctgctttttcgaaaaacaaagcatgaactttcagaggtgattgctccgaaagttcatggtgcattgaatcttgatcatgcaacgaggtcgctcgaattggattttttcgccgttttttcttcagtcgtctctattgcagggaacgaaggccaatgtgattatgcatatgcaaacggctttttagatcattttgccgaatatcgggaacagaaacggcaaaattctctgcgcagcggccgcacgctgacaatcaattggcctttatggcaagacatcggaatgggggcgaacctgtcaggtcaagggcggacgtctctttttcatggttccgggctcgaagaacttcctgctgaagacggaacgcaatggttttcgcggattgtaacttcgggtcagctgcataatattgcagtctgcggtgatcatgagcgctttgaacaatttatgcggcagagatttttgacggacgaaacagagacaggcagtgccattcctttggctcaaggcgatattttggatcagacagttttgtttttaaccaatatcatctcctctgagatcggtgcagaacgggaagagatcgatcaagatgtgcatctggctgaatatggaatggattcggttatgattcatcaatgcaacacaaagctggagcagtcactgggagcaatttcgaaaacgcttttatttgaatttcatacaatcagagatttagcagatcatcttgtaaaggaatatccggatcggctggggcgtttattttcacgggaggaaaaaggaaaacagattcagagcattacccccgccaggccggaacaaaacatcactgcacctgcggcggaggaaaaagaacatcttgacgggatagcggtaatcggtatcagcggccgttatcccggggctgaaaatatcgaagaattgtgggagcttctatcaaaagagagaaccgcaatcacagaaattccgaaagaacgatggaattatgagacctactatgatccagaccccgctaaagcgcatgaggggaaaatttattgcaaatggggcggatttttaaagaatgctgaatcatttgattctttgtttttccaaatatcgccgagagaagcagaagcgatggatcctcaggaacgaatatttctcgaaaccgtatggaaagcatttgaagattcgggatataccattgaagggttgagaaagcagaccgaaaaacatgtcggtgtatttgcgggagtgacgaccaattcttacaagctgctcggcgaaagaataccgacggacaaaaacgatgtacttccaaattcgttcccatggtctctcgcgaacagagtgtcttacacatttgactttacaggtcccagtgtccctgtagatacggcttgttcttcatccttaacggcaattcacatggcttgccaaagtttaacaaagggtgagtgctcggttgcggttgcgggaggagtaaatttgtatcttcatccttctgactatttataccgatgtcagatggggatgctttcaaaatcgggaaaatgcagaagttttggagaaggcggcgacggtttcgtgcccggggaaggtgtcggggctgttattcttaaaccgcttaaagatgccatacgtgataatgatactgtgtacgccgtcattaaaggaacggcaattaatcatggcggaaagacaaatggctatacggtgcctaatcctgccgcacaggcggatttaattcaaggagctcttaaagcggccggttggagcgccagaagtgtcagctttattgaagcccacggcacgggaacgccgctgggtgacccgattgaagtccgaggcctgaccaaggcgtttagagcttataccgaagatgtttcatattgctctctcggctcgattaaatctaacatcggccacctggaagcggccgcgggtattgccggcctgacaaagattatcttacaaatgaagtataaaaaaatagccgcaacactgcatgctgaacgggtgcatccggatctttatctggaagagacacctttttgcctccagcaggaaaccgccgactggataaaacccgcgaatgaaaaacattctgacagcaaatatccgcggcgtgcgggattaagttctttcggagcgggcggggcaaatgctcatatccttgtggaagagtatgagtctgctgctgactgtcatacgaggcgtgaggaaagtgaggaacttatcgtactctcagccaagcattcactgagtttacgggaatcagcaaaacagctggaggaatatcttcaaaaggcccgtcataagcagggcgagtttttacagcaagcgggaacaaacaagccgcttcacctttctgatattgcgtatacccttcttgaagggcgtgaagccatgccggaaaggcttgctgtcatttcaaataatatcgatgatctgatgttgaaattaaatcacttttataatggaattgacgatcacgaaatatttagagggaaaaaaccgaatcataaacgcggacagcggcaatcggatcttccgctcaaatccggcagcaccacattagccgaaatggctgaattttgggtatcagggggcaatttaagctgggatgacttccgcaccggcagaaaaccgagaaaaattgccctgccgacttaccctttcttaaaaaacagactgtgggtgtcgaataaggcgcaaacaacatcagctgataaagctcctttatttgatttttcagcaggtgagtgccgattttataaaacgcttttagattctgaatattatgtaaaagatcatgttgtgcatgggaatatggttctgcccggagcggcaatcatcgaagcggccagagaagcgggagagaggctgtacggaaaatcagtcataaaactgagtcaggttgtatgggcggttccgataaccgttgaaaaagaaaagacgataatgatagatctgctgccgaatcaaaaagacggcagatttgtggtgaaaaccgatatgcaacctgaagcggcagttcactgccaaggaaacattatcacatgcggagatcaagatgcctctcatacagagcattttcaattggacagctggttaaccggacagaaaagattaatcagcggcgctgagtgttacagggatttccggcagagcggtttggaatatggagccagctttcaggtaataaaacagctgtttatccatgaaaatgctgttcttgcacgaatatcacttcctgagagcattcataaaaaatccggcacgctgctggaaccgtgtttattggatggcatttttcaatccacaacagggtttacgttcggtcagcaagacgatcacaccgcatatttgccttttgaattaggtgagctggagattcttcaggcaccttcggcaaacggctatgcttacattacagctgccgatgaaagacaacatgatgatgtcaaaaggtttcatatactatttatggatgaaaacggatctgtaagtcttaaaataaaaaacttagcgttgaaggcattaagggctgcaccgcagactcaggatgagcggcattcagttaagtattacactgatatgtggaagcgggcccctctgcttcatcagcctgaagccagcggtttaaacagctgccttgtgatttcgctccgtcgggatatatcagaaccgctgatccgccaggcatataaagatatcggcctgaacatgatctttgtccgccatggcggcagttttcaagaaaaagaagctgattcctttgaattgaacagcgtcaaacttgacggctatcagaaattgctggcgattcttaaagaaagacaagtgacaattgaccgcgtcattttaatcgggatgagccctgaaacgggaattgagcagaacgttcgtgaaaagctggaagaggctgttttgccggttttcaatgtaacgaaagctctgttagcaacaatcccaagacataaaatcctgatatcacatgtatttttcacaagggaaaatcaaatcttaccttatcaaatggcaatcagcggcttttttaggtcgcttcatttagaacatccaatgttgtccggtaaaaatattgaaatacaaagcgacgaaattcagttacagctgaacacccgtctgcctgaattaaaaaaccttgtgaaagaaacaatcatcagcgatgatacttcagaaatcagatacagagatggaatcaggcaggtgaaacactctgcagaaattgaaagtgccgagccccccgaaaagatggaagtaaaagaagggggagtttacctcattacaggaggaacaggcggtctgggactgattttcgccagacatcttgtgcgaaaagggagaataaaacttgtccttatcggcaggtcagagctttctgaggaagccgtaagcaatgtaaaagagctcgaaaaaaacggatcagaggttttttatgtaagaaccgatatttctgataaggaaaatgtcaataacctgataaaactcgtcaaaaacaaattaggtcctgttaaaggaattattcacagcgccggtgtgataaaagattcattactcatcaataagcgtgaagaggatctcgattcagttttggccagcaaggtttacggaacaatatggcttgaccggtatacagacagagaaccgctggacttttttgttatgttttcatctatcagcgcaataatcgggaatgccggacaaactgattatgcttatgcaaaccggtttatggattattttgcggaaatgagagcggcggaaaataaacctggaaaaacagtctcgattaattggcctttatggaaagaaggcggtatgcaaattgatattcattcagagaagttcctttatgaccgtttcggaatgctgcctctgggaaaacgggaaggccttgcagcatttgatcaagcaatgacagggtgtgaacatcaaataatggtatttagcggtaatgaattaaagctggaacgaatgataacgattggcagcggaaaaagtgatccggcaatcgccgacgaaaatcacgaaccgaaagagctgtcaataactgaatctttaaaaagcactttgacgcgcatcatcaccggcgtattaaaaattgaagaacgggaatttgattttgaactgccgataagtgaatacggatttgattcaattatgtttacaatgctgggcaacgaattaaacgaaactttaggaatatcaatgatgccgtcagattttttcggtcttactgattttaatgaacttcttgagtttttaaagagtgagtattccgaggagcttcatctctgcggttctttttcttcagatgaatctgcggcgaaagaccggagagaaaatctgattgagggcatcgcaaagatgatgtcaagtattttgaagattaacagaaaggaaatagaagaagagacttcattcggcgagtacggatttgattctattacgtttaccagactcggaaatgaaatcaatcaacaatatggtacggaattattgccgtccattttctttgaatgcaattcactggatgaattgactgattatgtaatcgagcaatacggagaaatcctttttgctgagacagaatctttttctgcagctgacgaaaaaacattgtacagcatgcctccgccggaatcccatgaacattcccctgagtctgaaaacaaaaccaggcaagaggaaagacatatgaatgagccggttgcaatagtgggaataagcggccgtttcccccaaacagatacgctggaagacttttgggaaggaattgaaaaagggcgggatatgattacagacattcctgaagaccgttggaactggaaagagtttgacggcgatccgatcagggacgtcaatagaacaaaaataaaaaaaggcggatttatcaaaggcgcggacagttttgatccgttgtttttcgggatttctcccgccgaagcagaattaatggatccccagcaaagaatttttatggagactgtatggaaaacaatagaagatgcgggctataagccgtctgatttggcagggacgaaaaccgcggtgtttgcaggggtcgccacaacggattatgctgaacgtctgaatgaaaatggcgtctctgttcaggcgcagaccgcaaccggtttaaatcattgtatattggcaaatcgtatttcttaccagctgaacctgacgggtccgagcgaaccgattgacactgcctgttcaagttcgttagttgcactccatcgtgcggctgaggggattcaaagaggcgattttgaaatggcgattgcaggcggagtgcatattatgacaagccctactctgtttatagcttttgataaagcaggtatgctttccaaagacggaaagtgcaaaacgttcgataaaagcgctgacggctatgtaaggagtgaaggggcggctgcagtattgcttaagccgctcagcaaagcacaggcagacggtgatcatatatatggtttgattaaagggtcagctgtaaatcacggcggccgcgccaattctttgacagctccgaatccgaacgcacaggcggacttattaaccgaagcttggcggaaggcgggagtcagccctgccactgcgggatatatagaagcgcatggcacagggacaagtcttggcgatccgattgaagtaaacagcatcataaaggcatttaaaacgttatatcaagactgggacattccttttgcgaaacagaaatgctgcggaatcgggtctgtgaaaacaaacatcggccatctcgaaaccgctgccggaatagccggagtgatgaaagtgttactggcttttaaatatcgcaaacttccgggactcgcccatttttcagaactcaatccatacatcaaactggaaaatacgccatttttcatcacagaaaccgctcaaaagtggaatccgataaaagataaagagaacaacgatctgccgaggagagcgggtgtcagctcattcggattcggcggtgtgaacgcgcatattgttttagaggaatatagggaacctcaaaaagaagtgccggaaaacaacggtaacacacatatttttgttttatctgcgaaaaccaaagatcaattacttgagtatatccggcttatgcttcagtacttggatcgcgtgattgccggtgacatgaccgttaatgccagtgacatggaatttacattgcaaaacggccgggaagcaatgaacgaaagaattgccgtatgtgcagcgagtctgactgagctgagagataaatacgtcagctttcttgatgacagcaaggtgcaaaaaggcgtatttataagcgaaaacactgaagagcccacagctgtttctgaatatatgattgaggaggctcttcaaagcggaaaagaggagctgctcgcacaatggtgggccaatggagccgagtttgaatggaagacaatcggcaataagaaattgaatagagtgccgctgccaacttatccgtttgcaaaagagagttattggttcaccccgaaaaagaacaaaagtgaggttaaggttaatagcaaaagtcttcacccattaatcagcgagaatgtctcaacattaaagaaacaagcatttaaaactgttatttccggaactgaatttttcgtcactgatcatcttgtttcaggagactatgtgctgccgggagccgcttcgcttgaaatggctcttgtttgtgcggaaataagcggagaaagtaaagtatataaaataaaagacgtgatgtggaacagacctatattatataaaggaaaaacgctgcacatttataccgacttggaaatgaaacaagataagttgaacgtaacgatatgtaaagagggtccggatggcgtgcagcaaatctgcacacaaagtgaaacagtattcggagacataaacagaaatgctgagtatgtcgatattgataagttcaaacgcagcagtaaggctgtcataagccgggaagagtgttatcaccgcttcagtcgtatgggcctgacatatcatagcagttttcaaacgttgaaagccgtataccgcggtgatatggagttaatggcagaattggagcttccggctcatttagcgaacgggttttcacattttacacttcatccttcattaattgacggcggttttcaagcggcggcatttttgttaagagataatgagaaagacggcttatttgttccatattcacttagagagcttcatattaagagggcgcttactgcccgatgccatgtctcggtgagagaaaccggtttttatacgtataacattgattttattaacgagagcggcgaaatagccgtgagcatgaaagacttttctgtcagaaaagtgaccgggggagaattaaccgcaggacgtaaaaatgaagatcaggaaattctcttcttattagaacaattgaaaaacggtgaactttctgctgaccaagtttatcagctgctggagggaaaatagtgcagatcaaacaaatactttccttaattgaagaacagcaaatgtctcctgatgcaggactggagctaattcgcacttacagaaaagaacaaatggaaaaaaaggcggagccggaatcacaagctccgtccccaaccattttttttaagaacgattgggtaaggacaaataacattgatatgccgaatcagcaggcaccggggaatatgctgatttttgatcaggataaccgtctgtttcagcatgccgagatgatgaatggagatcataaccgtgtcattctcgtaacgcccgattctgattatagaattgaacggaatagatgcacaatcaatccttctgatgaaaatcatgtcgaaatgctgctgtctgatttggctgtaaacggatttacacctgatgtcgtgctttatttatggaacgaagaaatcagagaattcactgaagaatccgttaatgaaactcttcgcagagggatcaactcgctctttttattatcaaaagctttaatgcggagaaacgaacctgttacattattgcatatttattggacaagcggtctgaatcagccgtttcaggaagctgtcggagggttcatgaaaacggtaaacatggaaagctccaagcttcaagcgaaaaccatacagattcgccatgaggattctgacaaaaatcctccggtttccgagatgtgggatgctgcaatcagtgaaatacagcgctttcaaacggatgaatgtgagattttaatagactcacatacccgttatgtgaaagggctgcagcatattgataatccggaacacgataacggatctgtaacgtatcaaaaaggcggtatatatatcattaccggaggagcgggaaaactcgggctgctgtttgcggaacacatcgctaaagaaaaccaagccgtgattatacttacaggccgttcttttttaaccgctgatcaaaaagaacggatcagtaagcttaatgagagcggctctattgttgaatatcagcggacggacatcacagatcgaacagaggcagagcgattcattttcggcgttaaacagcggtacggcagcataaacgggatcattcatgctgccggcattcttcgtgactcatttcttgtaaataaaagtctcagtgattttacggacgtactgaaaccgaaagtttacgggacaatctggctggatgagctgacaaaagacgaagatcttgatttttttgttctcttttcttctttttccgcttatggaaatgccggccaaagtgactatgcgtacgcaaatcattttatggacagttttgcagtgcttcgatctcagctctcccgaaacggaaaaaccctttcaatcaattggccgttattgaaagatggcgggatgagtctcgacagcagtggaatcaaccaaataaaagaaaaatacggaatgactccgatgcgaacttcctctgttttggaagcgtttctaaaaatgctgcggtcttcatttaccagcttaatgcctgcagaaggaaagcgggataaaatgataaaagcgctttctattcaaagaaatacagctgcagcagatcaagatacactcacggcggaacacgatgaagaagaggaatatgctgcgaaagaaaaagtcaatgactatttaatcaagatcatcagcggtgtcttgaaaatccaagctcataaaataaatgcgaaggactcttttgagaaattcggaatcaactcacttatgatcatgtcacttatttcaaagcttgaagatactttcggggatcttccaaaaacaatcttttttgaatatcagaacattgaagagctttcaaacttcttcctaacatcttttaaagaaaaagtgcttaaggccgcaggggcagctccggtaacaagagtgccgaagaaaagagaaaatctgagtaaaaaacagcaccggcagcagagggttgcatctgcaccgagcatggttcagccgggtgaggatattgccattatcggtgtgagcggaagatatccgaattccgatactcttgaggagttctgggaaaacattgccggagggaaaaactgtattattgaaatccccgaggaacgttgggatttcagatcgaattacagtcctgacagaatggagaagggaaaaatcaacagtaagtggggcggttttatcagcggtgttgatcaattcgatccgctgtttttccacatttctcataaagaagctgagctgatggaccctcaggagcgaatttttctcgaaacctcctggcatacgtttgaagattcaggatatacaaaagagaagcttgacgggatgaaagccggtgtgtttgtcggagccatgtacggacaatatcaattattcggcgcagaagaaactgcgcggggaaatccgattgcgctcagttccttcttttcatctattgcgaacagggtttcatacttttttaatctctccggcccgagcattgcactggatacgatgtgttcatcatcgctgacggccattcacttggcatgtgagagcattaaaagaggggaaagtgaaattgcgcttgcgggcggcgttaatgtgtccatacatcccagcaaatacctttggctgagtcaaggtaattttgtttccaccgaaggattgtgcagaagtttcggagagggcggagacggctatgtcccgggagaaggttcgggcgccgtccttttgaaacctttggaaaaagcaattgctgatcaggatcatatatacggagtaattaaaggaacatctgtaaatcatggcggaaaaaccaatggatttacggttccgaatccgaatgcacaagctgagctgattgctgaaaatttcaagaaatcgggcatcagtccgcgttccgtcagctacttggaagcacacggaacgggtacctcgctcggagatccgattgagattgcaggattgacaaaagcttttgagaaatttacggacgataaacaattttgtgccataggttcagtgaagtctaatatcggacatctggagtctgccgcaggtatagcagcccttacaaaagttcttttacaatttaagcatcagaaattggcgccatccattcactcggaacagctgaaccaaaatatccgatttgaaaagacgcctttttacgttcagcagaacgaagaagagtggcggaaagaatcaggcgcctccaacaggagagcagcaatcagttcgttcggagcgggcggagcaaatgcccatgtcattgtggaagaatatcaaaaccatgcggacacacaaacaataagcggtccgtttgccgcagttctctctgccaaaaatgaagacaggctgaaagaatacgcccggcgccttctgcaattcacagagcgggagacaaaggtctcggcagctgatatcgcttttacattgcagacatgcagggaaccgatggaagacagacttgctgttgtagcttccgatttgccggaactaaaggagaaactgagaactttctgtactgaaggaacaattggggagggcgtatacaaagggaatgttacgaaagattttgataaagtctttatctttcatgatcaaaagatgaaagataaattcctcgaggtgatgatggagacaaaggacttgaatcttcttgcaaaattatggtctttcggggctgatattcaatggagagagttatatgaagaatataccccgcaaaaggtcaagcttcctttatatccatttgctgaggagtcttactgggtgcctggaagccaaagtgcagtatttccggaaatattgccgcagcagtcttcactgcacccgcttctggattcgaatgaatctactctggaacagcagttttttaaaacgacattaagagacaaagagatttggttaaaagaccacatcgtaaaaaacaagagcattctcccggcagctgcttttcttgaaatggcatgcgcagcgggaacgcggtcatatcgaaagaaaaaggtcactcgtttaaaaaacgtgatatttgccagaccggccatgcttttgcaagagagcctgaccatttacactcacatttccgtaaaagacggcagcatattatttaacatgtcacctgacgaggatgctgctgtaaggactggatttgtgacgggggaattagattatgatcatcattacagtgatgatgatatagagaacatcgacagacaagagatcataaacagaagtgcttttgtccgtgaacaagatgaatgttacgagtattttcgggaaaacgggttcctgtatgggcgcgcttttcagccgattcaacgtttatggggcggaaaaacggaagcggttgcacacttattgctgccaaaagaagccgcatatgctcttgaacattatacattgcatccgtctttaattgatggggctctgcaatctttgttcggcattacggacggaagagaagaggcatctgtttatgttcctttttcaataggagaggttacggttcggaaaaaggtttcagcagaatgctgggtttatgcgcgtaaaacaggccaaaaaggtcaatccgagcttatttacgatattcagctgcttaatgaacaaggagaaagacttgcaggtttgaaggatgtaaccattcgtaaaaaagaaacgttttccgcggaggcacagactcgtgcaacagcggattccaatggaaagaacgagagagtaaaagagctcctcagacaattaaaagcgggcgaactgactgcggaggaagcagattatgcgctggagcgtatgcaggattagtttatcattttgcggcagtgccatttgtaaaggggatgaagatttttatgaaagaagcccgtcatattagaaaaaaagtactttctgacatagaaagcggcatcatttctttggaagaaggagtaaagcggatacagcagcttggttctcattccgcagggggtagcggacaggcgatatattatcagacggtctggcagcggacagatctcagcattcatgtaaaaggcggccgacgtgagggcagccttttattatttcataaaaatgaagatgtgagtaaagaacttgctgcattgcatgatacaagggttatcttggttaagccggggaaagagtttcgaaaaaccggggacggtgtatttgaaatcgacccccgctctgaaagagattacataaacctgttaggatggcttatagaagaagagaagtcagatatacgggaagcggtgcatttgtggtcagacatgccgtttgaaaagacagagagagcgattcgtgaacaatgcgacagcggagtctattctttgtttttattacaacaggcgctcttcaaaaataactgccgcaaaccgatcaaactgttatatggatatttttcacatctttctggagaacagcctctttacgcggcggcaagcggatttttgcggacattgcagctggaaaatccgttaatctcagcaaaaagcattgagatagagcagtcaatagcagctgttcacgcagctgatatcatacgcaatgagctgagtgatttccagccttcagatgtagagattcgttataaagacatgcagcgttatgtcaaacagctcaaaacgtatgaacccgaaaaaaattcccgaagcggagatgtgccgctgagagaaaatggagtatatattatcgcaggaggcgcgggcggattaggatttacctttgcggaatatttggcttttcaaacaaaatgctgccttgttttaacggggagatctccgctttcagatcatataagaaaacagctgagacgattagaggatgccggttcttcagctctttatgttcaggctgatattaccaataaggaagaagccgaatatgtagtcaaaaaagccaaaacttcttatggaaaagtaaacggggtcattcagggcgcgggaatcatccgtgactctttccttcttaacaagtcacgagaggaattcgatcaggtaatcagaccgaaagtattgggtacgatgtggctgaatgatgctgttgagaaagaaaatcctgactttttcatttgcttctcctctacttccgcagtgttgggaaatgtcgggcaatctgattacgcgttcggaaacagttatatggatcatttcatgaatatgcgttctgcccaggattctgatacgatttctctctctctgaactggccgctgtggaaagaagtcggcatgcaagtggatgagcgcacggtagagacaatgaaaaaggcgggtttttatcctttagaaaaagaggaaggtaaagaagcgtttgcagtcgcattgtcctccggtttttcgcaatttactgtattttacggaaatgagcaaattgacaatcatgttcagcaattatatgaacgaaaagacaatattcaggcagatgaaggaacagggagaaatatcgaatcatttgattcagagaaactgacagctgaaacatctgatttcatcataaaagtgattgctgcagaattcaggatgcctgcggacaaaatagatgcagaagaggcattggaaaaatacggacttgattccgttatgattatcaatatgacgaatgagcttgaaaaacatttcggcgcgctctcaaaaacgctgttattcgaatatcagactgcggcagaattgtcacagtatttcgttgaggagcacagggatactcttcttcataaactccggttaggagaaaacgggagcagcaccccatcacagaagaaaaaagatcatgaacagacagccgatgttaacgggaaacagaaaatccagatgaaaaatcaggtgcagcaggagaagtatcatgacaatgatatcgcgattatcggtatcagcggacgttacccgatggcaaatgatcttgatactctgtgggaaaacttattgaacggtaaggactgtataactgagatacctaaggatcggtgggattcggggctgcactatcagcctgcggcgggcgacgaagtaaaaaaccaaagcaaatgggggggatttattgacgatgtgtatcattttgatccgttgttctttaatatttctcctgccgaagctgaattaattgatccgcaggagagactgtttttagagacggtttggcacaccatagaagatgcggggtacgcaaagaaaacgcttgaacgaaaaaacgtcggtgtttttgcaggggttatgtacggccaatatcagctgtacagcgttggtcacgaagcggccgtttcttcctcatatgcatcaatcgccaaccgggtatcgtacttttttaatttcagcgggccaagtattgctttggacacgatgtgttcctcatcattaacggctgttcattttgcctgtgaaagtttaatcaggaatgaatgtgaaattgcaattgcaggaggcgtcaatttatccattcatcctcataaatatgaactcctgactcaaggcggatttttatccagtgatggccggtgcagaagcttcggttcaggaggggacggctatgtgccgggagaagggacaggtgccgtgctgctgaaacctgtaaaaaaggctattgcggacggtgatcagatttattcagttattaaggcaacagccatcaaccacggtgctaagacgaatggatatactgtgccgaatcccaaagctcaaagtgaggtcattacgagagccttaaaaaaaggatttattgatccaaacagcatcagctatatagaagctcacggaacaggcaccgcgttaggagatccgattgaaatcaccggtctgaccagagcattttcaggtgccgaacgcgataagaaaacatgcgcgatcgggtcgattaaatcaaatatcggacatcttgaggctgctgcaggcatagcgggcattacgaaagttattcttcaaatgaaacataaaacgattgttccgtcactgactcattctgctgaattgaatgaaaatataccgtttcaaaaaacacctttttatgtaccggacagtgccgaaaaatgggagtcatccgttcccaggcgtgccggaatcagttctttcggggcaggaggagctaatgcccatgttattttagaagaatttgcggatgaagctatctctcctctcgcggctgaagaacctgaacagcttttatttgttttttctgcaaaaaatgccgacaggctggcagaatatgcaaaacgcgcaaaagaacatatagcagccagagattatccattagaaacacttagaaatacagcatttactttacaaaccggcagagaagaaatgccgcacagattggctgttatcgcctccacaagagatgaattgcttaaaagactgacagactatattctcggaaacgcgacggatcatatttttacaagcggcaaagacacaacagaagctcaaaggatgaacatagctgagattgaagaagcagccgcaaacagggatcttgtgaagattgctgaatactgggttggcggtaacggagtagattggccgtcactttataaagatgtcactttgagacggatttcagcacccggatatccatttgccaaagagctgtgcagaatagatgtgcaaaatatgggaagccgccggatgaacgttaataacgatctgcatccttacatttcatgcaatatatctgattttaaagcacagaagtttcttatcaatgtaagcgataccggtttgtatataaaaacaaagtatcaagacaaggaaatgtttccgtttctcagccagattgaaatggcgagagctgccggagcgatggcttcagggaatccgattattaaattaacagagctctcctttagagaaccgatgttacaaagcggaagcaatgagcagatccggattgtattaaccccggataatcagggtgcatcgtattctatagaaaaacagagcgactcatccatttattcctcagggcggctcgaattagaaggcggggcgtacgagaacggaaatgttcatcttgagccgtttctgtctcagcgcgcagaccgcataccgtacgaagcgttttatcagcggcttgccgaattcggatacagctgcagtgacagtctgaaagcggcagagtactgcgtcagcaggaacggacaggtacttttaaaaataaaagcaaaggccgggccgaaagggtgcataatcaaaccggaagttattgagagcgtatatcaagccgtcatataccttgcgggggaaaatgccggagagctcccggaaaacattaaggaatgtacgatttttgatcatgagactgaacccgtttatgtatatgcagaacaaactgaagaaagcgattcggcttatgatgtgtatgtattagacaatgccggcgggattttgatggagctgagcgggctggtttttggcgaaaagcctaataaaaatgtacgtttttatgagcataagtgggatcaaaaaaaccctctgattgaaatcaaagatagggagccaaaaacaattctggtctttgcaaaagatgaagcattagctgaagctctgaaaaatcaatcagacagccgtgtcattctcgtcacgccggatcagcggcagaccgatcaaaatctgctgacattctgtgtaaaaccggaagtgacttcagattacattcgtttattcgaagaattggagaaaaagggggttgctcctgatgtcatcttgcacacgggagaaacattttacgcgggtgaccgccttctcagcggcctggaatcaattttttatttattaaaagccctgagcgcccgcagtgacgcctctctttatcttcattctctgcttcttgttcactcttttaaagaaggcgtgaatgatccgtatacgggcgctcttgcaggctgtttaaaaacggcaaatatgttggtgccatccgcagagaatgtgaagtcaatcggtttttcagaacgtatatcaattgaaaaaatggctgaattttgtcttaacgaaatggtttcaggcgcggaacggcaggctgaagaagttaaatatattaatgacaagaggtatgttaagacattaaaagactatgtattcaatcatacagagcactctcatcagctgaaacaggaagggatttacctcataacgggcggtttgggcggtctgggcctgattttcgcaaaatatttggcctctcaatatcaagcaaaattagtattgacgggaaggtcaccgttaacagctgataaacgccataacattgaccggctgcaggcgcttggaggagatgcggtatattatcaagctgatgccgcagatcaaaagacgatgggacgggtcatagaagaaacgaaacggacttggggctccattcaaggcgttattcattcagctggtcatgccgatgatcggttatttacagagatgaatctggctgatttttcagatggcatgactgctaaaattgaaggcacggtatgtttagatgaattaacgaaagatgagccgcttgatttctttatcgtattttcttctatttcttcggtcttcggagattttggacaggttaactatgcgttgggcaattattttcaagatcaatatataaattggagatccgaacagagccgccggcaagagagacaaggcaagagcatttcgattaactggccgttgtggcgtaaaggcggaatgcatttaaacaaagaagctgaagaagcatatctttccgcatccgggtttgattatttggaaacggaagaagggatagcggcttttgagacgattttggcaagtgactgcccgcaaatttcggttgttaccggggatgccgaaacgacaccagcaagaaaagatctgccgcatcaaaaagtaaatacgcttccggttcgtcaagaggaaatttcttatacagcaccggcttatacagacaatgtcctggaagaactgaagcaaatggtatcggaattattgaaaattaacattgaacagctggatacggcagagaatttcggcaatctcggctttgattctatcagtttgaaaacattagctgtccgactgaataaaaaatacaaactaaagctgacacctgccgttttctttacttacagccatattaagtctctttcagaatttctgaacagtgaactgcgtactgttgcaaaagggaatacagatgcagaaaaaaacatttctgaaaaaaggaaagtagtgcacgctgggaaaaccacggggaaaaccgtgaagccgccgcgaagttttccgtttgaaaaaaagacaacaagacaggctgaccatcatccggagaagcagccagttgccattatcgggatgagttgtgtttttccgggagcaaaaaatgcagatgagttttggctcaatttaatcaatgaaaaagatttgatccaggaaattcccccggatcgctgggattggaaaaaatacgccgaaggcaaaggaagcaacgaagtatattcgaaatggggcggctttatcacagatgccgataaattcgatgaggcgtttttcaatattaatccgcgggaagcagaactcatggatcctcagcacagaatttatttgcaggaaacctggaaagcgatagaagatgcgggttacaaagcttcaaagctgtctggcaaaaatatcggggtgtttacgggcattcaatttaatgattaccgccagctgctgatgaggcattcggacggggcgcacgcgtttgcgggaaccggaaacagccaggcgctcatcagcaatcgtgtatcccactattttaatttcagaggtccgagtgagtccattgatacagcctgctcaagcagtcttgtagcaatccacagagctgtgcgctcgattcaaaatggtgaaagtgagctggcggtagcaggcggggtttcgctgcttttagatccagtcacgcatatgtatactgataaactcggtattttgtctagggacggccggtgtaagacgtttgataaacttgccgacggttatgtccgcggtgaaggtgcagctgttctgttattgaaaccattgcaagcggcaatgaatgacagagacaatatttacggagttctgagaggaaccggagcaaatcacggaggaagatctgcttcattgaccgctccgaacccggaagctcaggcagaactgttaacgtctgtttacaaaaatgccgatattcctgttgatacgatatcttacattgaagcacacggaaccgggacagaactgggagatccgattgagattgaaggcttgaaaaaagcgtttggatcttttgagccgcatccaggaaagaatcatgatcaatattgcggcatcggttcagtaaaaacgaatatcggtcatttagagcccgcctctggaatgccggggctgattaaagtattactatccatgaagtataaaacactgcctgccacacttcatgtcaaggaactgaacccttacattcaattaagcggaacaccgtttcatattgtcaataaaactatgaagtgggccagattaatagatcgaaaaggaaatgaaattccgcgccgtgccggagtcagttcctttggattcggcggggcaaatgctcatgtcatcgtggaagaatttgaatacggacaagataaagcagtaactggcgagcgggaacaaatcattgttctatcggccaaaacaaaggaaagactgatggttaaagccaaagagttaacaacgtttttacatgaagaactatcagttcaattcagtcagcaagaggtgcaggaacgtgatttgcaagaggcggttcgggaagcggcagcgggtatcctgcgtttagataccgcagatatagatgcaaagacacctctttcggaattcggatttgatccgttggcttattccgaattaatctcttttataaaccaaatgtacggcacagaaatatcacttgacatatttcaggaattaaagacactgagcgagctgtgccgctatatcagcagcatccggaatcgatcagctgataaaccgtataagggcaattttagagagaagtccggaatcagtcttgaagaaatagcatatacgctgcaaaccggaagggaaccatttgaatgccgccttgcgatcacttgctcgaatacaggagatcttcttgaaaaattaaacggttacatccaggggagcaggctgcaaggtgtttatgaaggaaatgtaacggattttgatagtctgtacgctcctttattcggcggccccgaaggtcatgcatatgtacaatcactgattcagcaaaacaagccggccaaactggctcagttgtggacgatcggttgtgaaatcagctgggaagacttgtatgaggaggaactcaaaccggttaaactgtctcttcctctctatcctttcagtaagaacagacattggattcatttaaataaagatgaagcgcagaaggctgaggctttctcgaacactgagcttcacaactcaaataaagatacagcagatggagaaatcatgtcgcttcttgaaaaagcacaaacaggtgagatgaatacgaaagagacgtcagagctgatagaggagttgcttttccatgaatgaaaaaacgatgcaaattgagcaaatcgtgaaaaaggtgaaagaatgcagcctgacgcctgaagaagggctggaattaattaagagcttggggacaacccatctatatgaaatggtatgggatagacatgaatttaaaggcagtaaaaaattcccgcatacgaaagagccaattttatttttttgcgaagacgacagcatgtataccgtaatgaagagacagcttgaaggttatgaggcgcctttcatttacgtgacttccggcgagcgtttcgaagattgccggaacggtcgttttacaatgaactttgcaaaaggtgaggattatgatgcgttatgcggggttctgcgttctcaaaatataagaccccgccatattattcattttttggctgccgggctcttcaaaaatacagaagatgcaatgagaaagcagctcaataaaagtctgtattccttgtttcaaatgtttcaggccttcatggcgaacaaactttgtccgaaagcagaaattttgtatctgtatgaaaatgccgagggcgaggttcagccgatttataacgcggttgaaagttttcttaagaccgtacaggccgaaaatccgaatttcacatgtaaggctgcagagctgaaatcaatgtttgacgagccgtttacaaagcagcatattgcagatgtcatctcttttgaatggaacaatcaatgtaagacggaccactttacctgttatgagccgaggcattattataaaaggcagcttcaaagagtaaaaaaagaagatggggagaaacatagtttcagtgtaaaaaagaacggtgtgtatttaattacgggaggagccggcggtctcgggtatctgtttgctgaatatctggcgaaacaggcagaagtcaagctgatattaaccgggcgttccccggcctcccgtgaaacggcgcaaaaattaagtgctcttgaaaatctcggcgctgaagccttatatgtcccggcagatatttcaaaggaaaaagagacggacgctttgattaagcacattaagcagacattcggagaattaaacggaattttgcacagtgccggacttgttaaggatgcatttatcataaaaaaaacgaaagaaagcatagaagaagttatagcgcctaaagtattcggaaccgtttggctggataaagcagctgaagaagagcctttagatttcttcgttatgttttcatccctttcggccgttctgcctaatgcgggtcaaagcgactacgccttcgctaacggatgtatggacggattcacccagtatcgaagcattaagggacgtcccgggaaaacactttctattaattggccgttatgggatgcgggcaatatgacagtcgggccgggagagctgcaggctttaagacatgcagggctggaacttttatccgcccaagcagggcttgccgcttttcaggacagtatgagccgctctgcttctcagctggctgttatcagcggagacaaagatagaataagtgaattactctcaactgaccataaaaagatagagactgtgcctgaaaacaacagtaatctgccgcaattacatgaaaaagatctgaaaaagcaaacggtccgtcttttgacagagatcgtcggagcggaaacgggaagaccggcggacagtattttacccgaggatacgtttgaccgttacggaattgattctctaacgattttaggtcttaactcccgtctggaaaagtattttggaagagtgtctaagactcttttctttgaatacagcagtgttgaagagctgtcagagtattttcttgaacactatcagcatgagttgcagaaggcgtttttaccggcagccgaacagcgaattgatcattcggcgccggcgaaacggcagaagctttccgtttcccgcataccatccgcaccttccgaggaagatattgcaattatcggtatagccggccgctacccgatggcgaaagatgtggaacagttttgggaaaatatttcttccggaaaagattgtataacggaaataccgaaagagcgctgggattttcggaaatattatcacacaggtgacaatgcccgtcatgacagcaaatggggaggttttataaaagacgctgataaattcgatccgctgttcttctcaatttcgcctcgtgatgccgagttaattgatcctcaggaacggttatttttagagacagcatggcacacgtttgaagatgcgggttacacaaagaaaaagttgaaacggcataagacaggtgtatttgtcggtgtcacctacagccactatcagttatttgcagccggtgcttcagatgatgaggaacgtcaggcgctcttgtcttcttattcgtctatcgcaaaccgggtgtcatatttctttgacctgcacggacccagccttgcaattgatacaatgtgttcttcttcactttctgctgttcattttgcatgtgaaagtttaaaaaggggagaatccaccctcgccatagccggaggcgtgaatttatctttacacccggataaatatactttactttcccaaaatcattttgtttcaagcgatgggcgctgcagaagctttggagcgggaggagatggatatgtgccgggagaaggagtcggggccgttcttttgaaatcgctttctgccgcgaaggctgacggggacaggatttacggtgtgattaagggaacatctgtaaatcacggcggaaaaacaaacggatacactgtgccaaatccgggcgagcaggcaaacgtcatcagtgaaactcttgataaggcggggattgatgcagacagcataagttatattgaagcgcatggcaccgggacatctttgggagacccgattgagatttcaggtttaaccaaagctttgcacagctcgaaaagcgattatcgttgtgcaattggttcggttaagtcaaatatcggacacctagaggctgcggcgggaattgcttctattacaaaagtgctgatgcaaatgaagtataaacagcttgctccttcccttcattccgataacttaaatcctaatattgattttgaggaaacaccgttttacgtgcagtctgaactgactgattgggagacgccgcaaaatcaagccagaaggtcaggcatcagttctttcggcgctggaggatctaatgcccacattatcatcgaagagtataagaatgaagaaaagatggaaacggtaaagagcaacaagacgcaaattattctgctttctgccaaaaatgaagaacggctcagactcttgattgatgcatatataaaagaattggagccaaaaacgtcactagctgatgctgcgtacacctcgcagaccgggagaaacgctatggaagagcggctcgctgttgaggttagcagcattgacgatcttcgcaataagctgacgatgtatttgcggtcagatcataagttaaacggtttatataggggaaaggcccgccgaggcgctggtcaaaagaatgccctgtcagccgcccactttaaaagtgcaagagaaatggccattcactgggtgaacggaggagacgttcaatgggaagagatgtacactgcggaattaccgaagcttgtctctcttcctgcatatccttttgaacggaacagatattgggtgcctgccgcaaaagctgcacagaaacagaaaaaaacaggtgcaccgcaaagtctgccacacgcaccgactgacttatcatttgatgtattaaaaaaatcgtggaaaaaacaaaaggctgcgccttccgcttttacgaaaggacaggtgatgatcctggctaatagtgaaagtgagcggcttgcattcgaattgtttgattcagatcctctgattgaatccgctgtcatttgcgcagataactgggatcattcggatggagaagccaaaaaaacggctctagcagtcatagaagaaaatccggaaatcatcggcatgattgacctgtcagatttgcggagtgatcaaaacggggcacgcaccggcacaatcgggaagctgacactgctgcaggaaatcataaagacacgtaaacagcttttcgttttacatgtgaccagagggctgcagacatttctgaatgacaagccgtcgttagccggagccgaaacagccggactatataaaatgctgagtgcggagtatcaaaagataaaatcaaaaacaatagatgtagacggtcatgtcgggactgcggcggaattgagacaggtaatcacagatgaagcttacgctgacgggctgtatagtgaaatctgctaccggaacggtgaacgttatattccatacgtcgaaaaattacatgcagcggaaataaaccggaaactatccggtctgccagtatgccgtacggatcaaaccctgattattacagggggaacaagagggatcggagcagaacttgccagacattatgccggcaagggagtcaaaaaacttgtgttgatgggagtaaccgaccttccggaatctgataaaatagccggcatgttaaaagacaccgatgaaaagtcacctctttattcgaaattacaactgctgcatgagttggatcaaaagggagttcaggtggaagtgtattccgggccgctcacggaaaaagaaacattacatcgcttcttttcagaggtgagactgaagttcggcaaaatcggcggggtcattcattgcgctggtgcagccaatcattcgaatccggcttttattcataaatctgatcaagaaataagagaagtatttgagccaaaggtgcaggggatgcaggtacttcatgacatttttattgatgacaaacttgatttcttcattttgttttcatctgttgcgagcgcctttcctttattaggcgccggaacaagtgactatgccgcggcgaacgcttttatggattactttgcggcgtatcagcatgcagccggcagaacatattatcaatcaattaactggccgagctggaaggacattgggatgggcgaggtgacaagtccatcatatcaggcacttggtttactttcacattcaacagaaacaggtattgccatgctggatgaaatgatgacgataaacggatacccatgccttataccggcaaagacacatccggagaagttcatgctgcagcagctgctccagacaagaattcaagctgctaaaaataacccggatgctgaggaaaaagtgatttctggtcagagagacaatgaagctataatcaggaagttaatggagattttttccgcggagctgaaaataccttacgggaatttagatcaggatacgtcttttgcggattacggagttgattcaatcttactggttcagcttgtcaaaaaagcggaagctgcatttcaaataaaaattgaaccatcagcttttctggagtatccgagtttttcacaactgggcgtctatttaaacgaattatttgcaagtgaggggatcagtcctcaaattgattcagaaaacattgaggttcggaaaaaagagcaacatataaatcaaaatgcttccgaagtacgggacagcggatctcaaatacaacaaaccagtctgaaccaaatcgctattatcggaatgggctgtgagtttccggatgctccggacacagaaacgttctggacaaacttgaagaaaagacaaaatagtgtccgcgaagtcccggcgtcgcgatgggatatttcttcatactactctgacacctatgaaaagggaaaaagtatcagtaagtggggcggatttcttcaagatattgagtctttcgatcccgcgttttttaatatgaacaaaagtgaggcatcagagcttgatccgttaatcaaaaaatgccttgaggtcagcgtccagacattgagagacggcggctatacaaaagaagaagtatcaaacaaagaagtcggcgtcttcatcggttcgcggaccgggacgtttatgtccaaaataggttccccttcaaaaaatacgatcgtgggtataggacaaaatttcataggcgcgcatatctcacacttttttaatctgaaaggaccgaatctggttgtagacacggcttgttcttcttcattggtcagcgtccatctcgcttgtcaaagcctgatgtcaaaagagtcagatatggcgattgcgggcggagttgacattttgctggatcaaaagccttacgtcatgctgagtgaggctcgggcgctttcacctgaaggaaaatgtcatacatttgatgagaaggcagatggctttgtaccgggagagggatgcggcgcagtccttttgaaaagacttgatgacgcccttgccgaaggtgacagaatttacgcggtaattgactcatccgcggttaataatgacggacagacaatgggaatgacaacacctaatccgaaagcgcaaagcgcagtgataaaaaaagccctgaaaaaaggcggaattgatgcagatactctcagttatgtcgagacgcatggcaccggtacgatgataggagatccgattgaattaaaagcgctgacagaagtgttccgggaggttacggaagaaaggcaattttgcggagtaggcagcgtaaaaacgaatttcggacatttaatgagcgcagcggggatagcgagtattataaaggttgccttatccataaaaaatcagatgctcccgccgacattacattgtaaaacgccaaatccgcgttttaaatttgatcagtcgccattctttccgaacacgtctttaaaagaatggcgtcccagaaaaggggttttgagagccggaatcagttcttttggattcgggggcacgaacgcacatatgatattgagcgacagccatctcacattaggatatggagagacaaaaagacacccgctttctccggttatattcaataaggaacaatgctggatcgacaatggagaaactccagaaaaggaagagtcagaattgctgattcctttacttgatttcaaagaattataaagaaaagaaaaggaatgagacaggtggccagtaatcaaaactatcagttcacattaacaattaaacatacggactatattgtcagggatcaccgggtgcatggcacccggattatacccggtgtcacatttttagatatgatataccgtatggcgatgagcaaaggtttgcctattgaagaacttgagtgccagaatattttgtatttggaacctgtagcaacatcggatacctttgacagagaaatccgcatccgttttcagggattggaacagggatgggaaattcaggcgaagagcagaaaggtaaaagatgaccgcatcctggatgaaagctgggatgagaatatgacctgcaggctcatgcagaaattcccggaaagcatgaggtcaattcatatcgatgaaatcaaacatgcctccgtccgtgaagccgatatggagatatgttatgactatttaaaaaaggttgatatagagcattttgaatttatgaagagtctggggaaggtttatgcgtctgatcattctgtacttgcagagttgtcgctcagccaaattgccaatcaatataccggctattttcaattgcatcccacttttcttgatgcgtctaccatcatatcgatcctttatcaggcatgtcccgaatattttacacaaggatctccggcaagccggatgaagacgtatattcccatccatattgaatctttccgtatggcgaagcgcctggaagacaggtgttatgtgtacatagagaagcaagaccaaaatcatgattcaggggatgtcatccaagtaagttacggtttgtacgatgcatacggggaggtgatcgcttattttacgcggctgtctgtgaaacatattcgctcaaaagatttaattgaaaatctgaagcagactcgtttggaaactgaagcggcttctcagccaaaagacagcctgatcagaaaagattcaatcataaatcgaagcgaaagcattgagacacaccttaaagaattaatatccggggtttcaaatatagatctgcgtgacataaggacagacattggtttttatgaacagggcctggattcagcttctttgcttgccattgtcaaagaacttgaaaacaaaacaggggaacagctgtatcctacactcctgtttgaacagaaaacgatccgggaactcgccgcgtatattaaagaaaatcaaagaatgtccagttatttcttaacgcgaaatcaaccggctgaaaagcctgacatgatagaaagtaagaacgaaaatctttccgctcttataacagaaggagacattcagcagctgattgcagatatcaaagggactgcccctgaaacactctctgtggtaaaaggtttttatgaacaaggcctcgattccgtaacacttatgcaagccgtaaaggcattggaagagaaaacaggcagggaactgtaccctactttattgtttgagtatccgacgattcaaaaacttgcaaactattttgcagagagcggcgaaaaaacttccgttgaaaaagacctccctcttcatcatggagagaatcatacggctttgacctatttaacgccgcattggagacaaaaggctgcggcttgggacccgaattgcggaaataaaaagaaaagaacatgcctgctgtttcaatatgacagagagctttttcattttatgcgggaaaatgctgaaaatggattcgaaaatacacagatcattctcgttttatcagggaatcgtttctcctatcacggagacggtgtttatgagatagatcacagggaggaagctcactttgacaggcttgcagctgatctgaaaaaaagggggcaaatgcccgacaccgtggtttacgggtggccggaagggtcatttgccggcccggaaaaaataagtgaacagctttctaagggggcttacccgctattctttttcagccgggcattgatgcgcagcaagacggaaaaaaaggttgtatcgcttttcctttatccggcggattataaaaatgatcagccgctttacgcttcagtccatggcgcagggcagtctattgtgcttgagaacccgaaactggcccttaagacaatcgggatatcagtttcagacaagtcatcgttgacggaacttacagctgaaatcatcagagtcgaatctacggaagctcatccgggagaaaccgatctttattatgaaggaaatgtgcgctgggtccgtgccttacgggaagcggaaccggctccaaactcagatttctcctttaaagaaaacggagtatacatgattacaggaggggccggcggcttaggccttatatttgctgaacatatcgcagcccaaacgaaagccaatattattttagcgggccgttctgaacttacggaagacaaaaagaacaaaatcagccgaatgaaagcaggcggttcttcggttcaatatataagaggtgatttttcagatagccgtgatgcagagcgaatcataaaaaccattaaaaggcaattcggagaaatcaacggtgtgatacacagtgccggtgtgacgcacgacgctttattgattcaaaaatcaaaagatgaaattcaggaagtaatcgctccgaaaataaatgggacggtcttattggacagcttgctgcaaaccgaacctttggacttctttgtgatgttttcatcaagcacctcgatgtacgggaatatcggacagacggattacgcattggccaaccggttcatcgatcttttcgctgagtggcgtgaaggaatgaggcggaaaaaagaacgctccggcgtctcagtagccatcggctggccgctatgggaagacggcggcatgaaagtggataaacaaactgaaaaatggatgaaacaaaaaatcggtatggttcctcttagtaaaaccaatgggatcaaagcttttcaagattcactctctctgaacgcatcacagctgatcgtgtttgaaggtgacaaagaaaaattggaatctgcacttcaagataccttcatagaggatgaaaactgcgagatccaaataaatgagaaagctgatacaaggcatgaggacattgccattatcggattaagcggaaagtatccgatggctgaagacttacctgaattttgggagaatttaaagagcggaaaagattgtattacagaaatcccgcctgaccgctggaatatggatgatttcttcagcgaagacagagatatgaaagggaagtcttacagcaagtggggaggttttatcagcggagccgatcaatttgatccgcttttctttcatatttccccaagggaagcagaacttatggatccccaggaaaggctctttttagaaacggccaaacattgttttgaagactcagggtacccgagaaacatgctggaaaagatgaaagtcggtgtatttgtcggtgcaatgtggggccaatatcaactatttgaaggagaagaaaatggagtggctttctcgccggcgtccgtctattcttcaattgccaatcgggtgtcttattattttcatttaaaaggtccgagtttggctctggatacaatgtgctcttcatcactgacctctattcattacgcatgccaaagcatacattgcggagagagcgatatggcattagccggcggagtgaatttgtcaatacatccgaataaatataagttcctcagcatgggacagtttctatcaagtgacggcagatgccggagttttggaaaagacggaagcggttatgttcccggtgagggagtcggggccgtattgttaaaaccattgaaaaaagcaatagaagatcaagatcaaatatacggtgtgattaagggaagcgccgttaaccatggaggaaagacgagcggatattccataccgaatccggatgcgcaggcggaggtcatttcagaagcgcttcgtaaagctgacattgatccgaataccgtcaattatattgaagcacatggaacagggacgtcattaggcgatccgattgaaattcaaggactgaaagattcctatcaattgaaccatccttgcgccatcggttcggtgaaatcaaatatcggacatttagaatctgcggcaggaatcgctgcggtaacgaaagtgcttctccaaatgaagaataagcagcttgttccttctctgcattccgatattgttaatccgtttatagattttgatcaggttccttttcaagtgcagcggaaagcggctgaatggaatattccgcaaaacagcaatgctgttcatcctttgagagccggggtaagcgcttttggggcaggaggaacaaacgcgcatcttatattggaagcgtatgagccgccaaaagcttttgatcatcaaagcggccgagtgatctttgttttatcggctcaagacaaacaacggctgataaaatatgcggaggttatggctgattttctatcagaaaatgaatcgaaggataacaatgataaactgcgtcttcaggatattgcctatacacttcagacgggacgcgatcatatggaagaacggctggcgatagtggcagattccgggcgggtcattgctgaagagctctcagcttatatcaggggtgaaaaaagcagcttgagctataccggtaatacattcgaatcagaagttcacaatgaaatgcctcacgtttgttcagattacgccgaagcagcatccaaatgggtaaatggaagaaagatagattgggagacttttgaggtgaatcggaatgctcgcaggatttctattccgggacaaccgctgatcaaacagcggtattggatagcggaaaaaggggaagcacttgtttcagcggatatgagtaagccgggtcaccctttcttggggagtaacacgtccgattttaatcagttcagtttcacgaaaaaaatcacccgtaatcatccgttcgcactaagtctgtctgaaggaaacgtgtcctttttcccttatgcatctttggctgaaatggctatcgtcaatgcagcggcggcatttggacaaccagttcatacattgactgatttattgtggaccgaaagcatgaacggaataactgatatacgggaactgatgattacgctgacgcctgagcgcgactttgcgcggtttgacatatatgcaaacacaaaagatgagaataaagtacgtcttgccaggggaaatgcgcatattgttaagcctgaaagcggtatgcttcctgaagcgcttgatattgctgaagtcaaatcaaaaatgactgaacatccggctgaagcgccttttgtcattgaatcagcgaaaaacagtgacggaatgctggcgcttcattcattgccggatgagctttatgcaaaaagagagaattttacgatctctcctgaagcgcttgagtccgcgatttttgccagtgcgttttttgtcagcggagaaaccttcccggaattgatcggaatgggagcggcggatgtctatcaccctctcgctcaaaatttttatgtctatactcaaaaagagaaccggcagaacagctgtgatgtaacgtgtcatatgacgtttacagatgaaaacggaagcattctggcagagtgcagagatgtgagattcagatatggtcatgaaaaagacactgttcagacggacgacgaactcattcgtctcctgcgtcaattggaaaccaatgatattgatcagaaggctgtattgaaacaattaatgggggaagaatgatgaacggaaaacgtgaacaactcagcgatattcttgatctgattcaaacaggacaaatgtcggctgacgaaggctatgcccgtgtgacatccattcagaatcaaaaatcacgggcatcgaaccatccgcttttatattacaagccggaatggacagaatcgttcattccgagtaagaagagcgtacccttgacgggattgctcctgatttttgcagaaaatgaacggcaaatacaagaattgagcggtttgtttaaggactgtactctcttgtttgttatccgcggaaaagaatttgctgttttacatgatgatacgatttgtatgaaccacgtgaaaaaagacgattatctaaagctgttccgatacattcatgatcattatcagctgcccgaaaagattcttcacttgtggtctgattctcaggctgacatgagtaaggaaggtatacagaaacaattggaaaacggattgttttctcttctgtatattacacaggcgctgattgaactaaaatggaaaaagataataaagctgacgcatatttttcaaacagagaataaagaacaactgccgctgcatcatgctctcggcggattggtgaaaaccgttcaccaggaacaccccaattttcactatcagattatcaatattacgcaatcagagggtgcgggagccgctcttccagcaatagcggatatatatcagagagagtgtgacgaaaaacgggatatccattttgaagtgcgctatgaaaacgggagacgttttacgaaaagctataataaagccggctcattcgatttaacccagccgctgaaacatcatgggaactatctgattacaggaggcctgggcggtctcggttatattctggcaaaacatctgtcggaacaatggaaagcgaatctcatattgacagggcgctctgatttaactgaagagcaggagaaaaagatcgaatatttaagaagttcaggttcaacagttgaatatatccgatctgatgtttcaaaacaaagtgatgctgaacggatgtttgcttttgcaaaagagcagttcggcaccttacatggagtatttcacagtgccggcgtactccgtgactcttttatcttaagaaagacaaaagaagaaattgatcaagtcacaggttcgaaagtttatggcacgctgtggctggcggaagaaatcaaaaaaatgaaagttgaattacttgtcttgttttcatccacatcggcagtcttcggctcagccggccaatgtgactatgctttcgccaatgcctgtttggatcagtatgcagcagttatgaccgcaaaagagtctgccggaagggtagtgtcagtcaattggccgctatggacttccggcgggatgaatattgacgatgaaggaatatcctacatgaaacaggaactcggtcttgacccgttagatgacggtgacggaatacaggctctggagaacagcttgtgtcaatcatctgaacagctgattgccctgaaaggccgtaaagaaaagattgaggatgtgctgaagcgtgccggcacaatcagcttacattcagaccagcaggaagatgccgatttgcaaaacgatgaattaagacaaaatatcatcagttatctgaaaaatataatgtcagaggaattgaaattaccggcctcactcatagatgaaaaacaatatctggagaaatacggcattgattcagtgatgatcatgcgtctgaccaaaaagctggagcaaagtatcggcagattgtcgaaaacattattttttgaatatcattcaatatcgcagttagctgaatatttcctgagtcatcacagcgaacgaatgatgaaactgctgaaaccggccggcacatctgaacttgtttcatatcaaaaaaagccaaaaagaaaaccagtggaaacaaaagcgccggtacgctctgaaggagaagattcaaaagagcacatggcggccgatcccctttctgctgatatagccattatcggtgtcagcggcaggtatccgggtgcggaaaacatcagggagttccagaatgtgctgatgaatggacgggattgcgtaagcgaaattcctgatgaccggaaagaaatgctggagggaagctgctataagtggggaggttttctgaaaaatccagaccggtttgatcctttatttttccggatatcaccgaaagaagcggcttttcttgatcctcaggaacgtctctttttagagacagtgtacaataccatagaggatgcgggttataaaccttcagatctgacccgcaaaaaggtcggagtatttgcaggcgtcacatatggaagctatcaatttttcggcgttgaagaatcacttaaaggaaatgaactggccgtcgggtctccattttctgcaatagcaaacagaatatcatatttctttaactttaagggcccgagtatggcggttgatacaatgtgttcatcctctcttaacgccattcacttagcctgtgaaagtatacgaagaggagaaagcacacttgctgttgcgggcggggtcaatcttacgcttcatccgaataaatatacattattaaatcaaagccgcttctttgcaagtgatggccgatgccggacattcggcgagggcggtgacggttatgtaccgggagaaggagtgggatccgtacttttaaagccggcggcggaagcggtaagggacggagatcatatttatgcgctgattaaagcgacagcggtcaatcacggagggagaacaaacggttttacggttcctaatccaaatggtcagtctgaactgatacaggacgcgcttcagaaagcttgtattgatcctcgtacaattagttatattgaagctcacggaacgggaacttctcttggagacccgattgagatcaccgggttaacaaaagcgtttcgggaatttacggagcacactcaatattgttccatcggttctgtcaaatcaaatatcggccatcttgaggccgcagcgggaattgccggtttgacaaaggttcttttgcaaatgaaactgaaaaaactgtttccttccatacatgcggagacgttgaatccaaatattgattttaaagcctctcccttttatgtacagcggtcattgcaagattggaagaaaccgaaactgcaggaaaacggaaaaacagtaactgttccgagaagagcggggatcagctcattcggagcgggaggaacgaatgttcatatcattatagaagaatatgaagaaacaaacgtctcaacagaacatgttgagaacgaaccgcattttgtcctgttatctgccaaagacaatgaacgtcttcttgagtatgccgaaaacatgagagattttatccagcgttcactaagtcctgaagtaaaggataagcagcctgatatgagagaaaaggtgtatgaagtactcaaaccgtttgtttcggaattgcttcatatccatccggaagaaattaatattgctgatcacctgagtgaatttggcgtagggcctttggaattaagtcggatggcggattttattaacgaaatgtttcatattgaactcacgatgtatgaattaactgtttgcccctccattcaagcggttactgaatacgtattgaaggaatatgccggagcgataagaaacctgttcccgaatgaagtgatggaaggcagccaatcggaaagcgtcgttttacgggatctggcatacactacacaatcgggcagagaagcgatggaggccagagcggcgattaccggtacctctcttaaagaaatcaaagataaattatttgagttttgccgcggtgacaagcacgttccaggcgtatatgttaatcagcaatcagcagatgcatttgctgaaaaaatgaaggcgttaacggaaggcacagcaggtgaattgtttgtaaagactattattgagaacggtgaagcggaaaagctggctcaattatgggtttggggggcggatatcgactggaaatccgttcatcaacatttacagcagccgggtaaacggatctcaattccgacttatccgtttgcaaaagaacgttattgggttccgtccaggactgagaagacagagatccctcagcattcttttcaacatcacttgcaaaaaaaatggagggagaatccgtttgtaaattcatccgaaacaaaagagtacggactgacagtagcatttgtaaatcaagacacagaatcaattgcccgcaccatttgttcggatatagatcaggagaatctgattgtcatcaaacatcactcttcatttataaaacactctgatcaaatgtttgagtgttctttattagatgaaaaccacgcatacgacgttatccgtgagatcttctcgggcggtgagcggcaggtccaaaatatatttgatttctcagatatcggaaaccagagtgacaatcagaacggcatcccatatggtaaattcttatttatacaagaaataattaagcggagtaaaaaggaaacaccattatccattttacaaatcaccaatggcttgcaggtatttaaagcggaaaaaccaaagctgacgggtgcagaatcagcggcttttctgaaagccctttctgcggaatacggctttgttcatgtgaaaacaatagatatagacagcatgaaagaaacgcatgagctgaaacaaatctttgagaatgaaagggcgcaatgtaccggagagaatgaagtatgctaccgcagcggcgtcagatatgttccgtattttgaagaagaaagaatccataccggcgagcctgtttcatttcctgcggataaagccatcgtgattaccggcgggacagggggcattggcagagcaatagctgaagatttggtgaaacggggagtgaaaaaactcgtgctgacgggtacgcgtccattacctttgcgaagtgaatgggatcatttgctgaaagagggcagacaggacgaaaagacagtcagcaatataaaactgtttcaaagttttgaagagaaaggtgtcaactatctgtattacagcggttctctcacaaatgaagagaagctgcgttcattctttcaccaagtaagccttgaatttaaagatataagcggtgtcatacactgtgccggactgcacagcggcggaaatccggcctttattcataaaagaatgagtgaatttaagacggtgtacgggccgaaagtcactggacttcagaatttggagcggatttttaataataggccgctggatttctttattctattttcatcaattgcagcacagtcacccaaactgtcgaaaggaatgactgattacgcgtctgcaaacgcatatatggactatttcgcggtttatcattttcaaaaggggagaacgtatttcacgtccatcaattggccgagctggaaagaagtcggaatgggtactgtgacgagtcctttatatgatgaattgggattggactctctttccacacgggaaggactggcgattttgtatcatgcactggagaaaaaatcggccaatatcattcctatcgtgaaaaaaggaacagtgtttcatgcagacagtctcctgaacatcaataaaaccggcggagcttcggttccagtccgaagacaggagactcccgacacttttgatcattcagaagggcttgtcagtgaactttctgccgtatttgccgaggaattgagcattccccttgaaaagcttaacccaaatacggattttcaggaatacggtgtggattctatacttcttgtcagcattatacatcgaatagaagcaatgattcagaaaaaaattgaccctactgtgcttcttgaacacaacacggttcatggtcttgcggaatatatcggtaagacggcgccgccgttgaagaaacaaatcgaacagactgattctcaaagcagcaatcagcaagatatgcaatctgtgacgagccgaaatacagaaccgcagacggcttccactgcaaagatagctgttatcggaatcggatgtaagttccctggagcggctgataaagaggaattttgggacaatctgagaaaagggaagaatcatattaaagaagtacctgattcccggtggaatatagaagaaaattactctccggtcaaacaaaagggaaaaagcatcagcaaatggggaggatttatcaatggaatcggcagcttcgatccggagtatttccgcatggaagaggagaaagccatccaaacggacccgctgataagacatttcttagaaacgagtgtacagactgtacgggatgccggttatgaagaaacggaattatcgggaaaaaaagtcggcgtatttgtcggttccagaatgggcggttacggtcacaaactgccgaaagaaagcagcagccacatcgtcgggcttagtcaaaactttattgcttcacatgtgtcgcatttctttaattttcacggtccaagcatggtttctgataccgcttgttcttcttcattagtcagcattcatttagcctgccaaagcataaaaaacggtgattcagagatggcgctggccggaggggcggatctgcttttggatgaaattccttacctgatgttaacagaaggaggagctctttcgccggacggtcagtgttttacttttgatgaaagggcaaacggctttgtacccggagagggttttggcgctgttctgttaaaaccgctggagaaagcgaaagctgacggagatcggatatacggtatcattgaagcatcagctattaataacgacggtgcgacaatgggaattacgactccgaatcctaagcttcaagagcaggttattcaagatgcatttgaaaaagccgatatcactcccggatcagtcagctacgtcgaaactcacggcacaggcacgatgattggagatccgattgagcttcaggctctgacaaaagtattccgaagagacacaaacaaaacgcaattttgcggagtaggaagtgtgaaaaccaatatcggacacttattaagcgctgccggagcggcaagtttcattaaagtgattttatcaatatggcataaggaaattccgcctacattgaattgtgaaacgccaaatccgcgctttgaatttgaaaagtcgcctttttatccgaatacagagctgagaagctggaaggatggaaaacggagggcgggcatcagcgctttcggttttggcggaacaaacgcccaccttttggtaagcggcctggatgattcatatcattccgtcagaactccgctgccgcctgctgagtttgtcagaaaagagtactggccggattcaaatcggaaaaaacaaatcaaacagaataaaaaacggcttcttgaaattattgatgaaacagagtagcacctgctctgtttctttactttgtaaaagaagaaaggttgtcgagttgcatgaggttcagcgtattagtcaaacatgacgattatattgtttcagaccatgtccttcatcaagtgcgtacgatacccggcgtaacgtatctggatttaataacacgatttttagctgagaaagggatatccccccgaagttttgaaatcaaacatgttttattccgtgaacctgttgcgacgtcagtccattttgataaaaaagtcaccttccagtttacggaacaagaaaacggctggcttgttgaaacaacaagcaggaaatgggtcgctgaaaaggcggaaggtgaagcgtcagtcaacttgcaggcggaaatcataagaaaaaatgcgataaacgaaaagacaatttcaatcgaagaattaaagaaaggggccgtccggacttcggatgctgaatccgcctatcgtaatttgcgcagaggcggcctgattcataaagattttatgaaattggaaggtacggtatatgaaggtgaaaattatattctgggagaggtcggtttaagcggactttcaaaagaatatacagatgacttttacatgcatcccgcatttttggatgggtctctcagcttgttgggaatccttacatcagacttgccggatgaaggaacaaatgcgtttatcccaatatatattgagacattccgggcactgcataaaacaactgggtcttgttttgtgtatattaataaaaccagtataacgcagccgccttctaaagacattttatatgcggacatagaagtatacaggcctgatggagagcttgctttttattatgagcgattcggtgtgaaaagagtcagaaatgaaaaatcaatacaaaggctggagcattcccaaaaagctaaagaagtcggcagcgtagcgaacaataaagaaatgatcagaaataatttgatccaagagatagccggcatgattgaaaaacctgctgaaacagtgaagaatgatatttccttttacgagatgggcttggattctaaacaattattagacttatccaaaaaattagaactgatgttaggttcaaagctgtacccgactttattatttgattactccacaatcggtgaattgacggaatttctgcaggagaaatacggagctgacattacagactctatctctgatacagttcagcaccaagacagtcataaaacattaacagatgagctgtcatccattattggagaggttacaaacacaccgccaaataaagcggacaaacaccaatctttttacgaactgggtcttgactcaaaacagctgctgcatatatcgaaaatgctcgaggaaagattggatacacaattgtatccgacattgctttttgattataacaatattcatgatttagcggcttatttagaagaaaaatatgatgtgcgtaatacgccggccgcagcttttaaagaaaaaacgcaaacgaaagagccgtctgaaaagccggtgtttgattccttgtatttacaaaaagaatggatagaatcgccattaaagtccggagaagtacctaaggaaaatacattgattttcgatttcggcagttcattgagtgatgaaatccgaaagtacatcggcagtgaaaatgttatttatgcggaagccgccgctgaatatgaaatagtaaatgaaaagcattataaatttaatccggagcagtctgctcattactccagactgttagaagatatgaaaaagtccggagcatttccggcgtcaatcattcattacctgtcaaaaaaagcttatactgaggcagcgttagatttgactcacagcttttattcaatcctttatttaagcaaagcgttgattcgtcaaaaaacaaaagaaaacatcaacattttgtacgtacatgacaagggtcaatatacaaatccggtttacgccgcgattggaggcttttttaaaacgctgaatgcggagcagccgaatataaagtgtaaaacggttgagatttcttcaagacaaaccattgaaaaagcacctttgcttctcaatgaattaagtgccggacatcatcaggctgtgaaatatgacggcgatcaaaaaaggcgggtgacagcatacaaagacgcttcgccgcaaacaggacaaaaggccgcaaagtttgcaaaaaacggggtgtatctcatcatcggaggattaagcggcatcggctggattatttcagcgtttctttatgcaaatcacggagccagcgttatcattgccgggcgatcgaaaatgacagcagacatggaagaaaaattagacagcatccgatatgacggggcaagcatttcttatatccaggctgacatgtcagataagcagcaggtcatcaagttagcggaaaaaattcgtgctgatttttccgaaatcaacggggtcatttacagtgcaggcgtgttaaaagactctctcattatgaataaaacagacgcggaagctcaagcggtgctgcaatcaaaggtcaatggtgtgattcatttggatgaagcgctcagagatatgcctttagacttttttgttttgttttcttccatctcctcagaaatcggaagtctgggtcaagccgattacgcttacgccaatcgttttctggagcattttgccgagtggagggaatgtatgagaaaggcggggggaagatcaggaaaaaccatcgctgtaaattggcctttctggaaagacggaggcatgtcagttgatcccggcattcaagatattatgaaaagggagtacggacttcacccattagaaaatactgccggaatcaaagcttttgaacactcgcttctcggccgaggccaccagctgatcgtgttatacggagaaaaagaaaaaatacaaaacgatttcaagccgttatccgcccgttcagcaccgcctctggtaagagattcagcgattgcagccgattttgatgcttcgtcagtcgttacggaagaagccgagagtcctttccgaatactcggcacggcttccaatcgtcatctcgacgattatttgcattattggagcagactgaagaaaggagcccttcagcacaatcaaagcgatgccgcaaaaaaactcatcgctttttaccagacagaagaaacggaaaccgttcattttctggcaaacacagaaaatgcccggcatatggaaatattgatgagcggtaagggtgaaacaattttactgatttgcggttttgctaccactgcttacatgtggaaagaacaaatgaaggagtgggcagatcaatttaatgtaattgtcatacacacaccgggttacgggctgagtgaggggagcgccgattttacactgagcgggctggctcagacttttatcgaagtgctgaacgagataggggttgcttggccgatccacattgcggcagcttcttggggaggcatgatagggcagaggatagcctatgaataccctgaaaaagtaaaaacgctcattctttccggaagttacaccgcatacgaagaagaccctgaaagcagtgtcgaggaaaaactgaaaaatgattttatagctataggaaagtcgcatgaatatgaaagtttatacagtaatcaattcttaaatgcttctattgaacgttttatgaagatacatcaacaagaaggctattctacgatcggctttttaaaagacattcatacaagaacgcttatccttacgggtgagaaggaaagcgtagttgatcagaaagaaacaaaaaggctgcagaaactgctgagcaatgcagaattaaagaaaattaagggagcggggcatcttccgaacatcacacatccggaagaatttaataaagcggtgtcagaattcatcaagaaatcagtaagtaagggatgaaaacgatacatacagtacagggggagaaaacaatgaaacaaacattaagcaatccggcatttgatatgaaacaaattaacgctcttaacggccattatcagacgatgatagacaatggagatctgcaatgtgcgagttatatgatgtcaagaggaggtgaggtttttgcagctgagtcgttaggggaatttaccggcggacaaaaagaaaagcaaacatttcagcttgatacaatcagagaaatcggttctttgacaaaagtgtttaccgctgtagccgtcatgcagctcgtcgaaaaaggtttgctcgatctgaaaatgccggtcaagctcattttgccagcgtttgataaaccgggtttcggagaaattaaaattttgcaccttttgactcatacggcgggattaagttttgagctggatattcaaaaggctgaaggcattgacttaacgaatgaggaagaatggataaactatctggttcgtacgcctttggagtacggagtggatgaagcatggaactattccagaaccggctttgttatacttggcatcattatttcaaaagtaacaggcgtatcctacgaacagtatgtaacaaagcatattattgaagcgctcggattagaaagaacgtatttttatgtgcctgatgctttaaaagaagaagtttgtgtgatcaatgagcacgagtgcgtacagctggaaaaaagtcatcacccgtattttccgaataaagcgacaagcggtctgtactcttcattgcgagatatttggaagttagctgaaatgtttagaaataaaggcagattgaaagataagaagctgcttggaagaaaaacagtcgaagcgatgctgagaaatcaaataaagcccggtcttcctttttacttcttcggagcgcccagagaggaaggcggctttggtttaggcattaatttgtggccggccggtgaccattatttcatgacagaaggcaccttctcacatcttggaatggggtggtgcggcatgttttctgatccagccgaagattttacgtatgtatttttcactccgatttccgagtttcatcctcatgccgtgctgacgccgctgaatatcgtgtgggcgggtattgaataattagacaaaagcatcgtcccgtctgttcggcaggcgggacgattgctaactgcccgtttttatcccgcggcatcttttcaaagcccgcccctaagttaaataacttaatttacactttgtaattttttttaattatagtacagtagagcatttttataatacagtttaaagtcttttatagtacagtttggcgcaatatgatcttaagttttataagcggtttcaaaatgaggttataaatgattgacggctttgtttaattactgtaaactatggttgttgatcatattgtactaataaaaaatctttttttattagtacagtttaaacgtcattatctttgcttaagcgctatgtgaatttctgaatgattaattttagaattgcagagcatgataagactgtttttaatacggatggctaaacggtatcctaaccctgttaaatcaaaagaagaggtggtttaaaaaatggctgcaaagacaaaaacttcaattgttgatagcaaaaaacaatttgatgctattcataagcagtttgaaacgttccaaattttaaatgctgaaggagaagtcgtaaataaagacgcaatgcctgatctttcagatgatcagttaaaggaattaatgagaagaatggtgtatatccgcattttagaccagcgttcaatttctctttcccgtcaaggacgtttaggtttctatgcaccgacagcgggccaggaagcttctcaaattgcatcacacttcgcgcttgaacaggacgattttatccttccgggttatcgtgacgttcctcagctgatttggcacggtcttcctttacaccaggcattcctgttctcaagaggccattttaaaggtaatcagatgcctgagggagtaaatgctttatcacctcaaattattattggtgctcaaattatccaaaccgcaggtgtagctttaggtcttaaaaagcgcggtaaaaaagcggtagctattacttacactggtgacggcggagcttctcaaggtgacttctatgaaggaatgaactttgccggagcatttaaagcgccagcgatcttcgttgttcagaataaccgctatgcgatttcaactcctgtagaaaagcaatcatccgcacagacaattgcccaaaaagcagttgccgtcggtattacaggtgttcaagtagacggaatggatgcacttgccgtttacgctgcaaccgcagaagcacgccagcgcgcaattaacggtgaaggtccgactctgattgaaactcttacattccgttacggacctcatacaatgtccggtgacgatccgactaaatatcgtacgaaagaaatagaaaatgaatgggagcaaaaagacccgctcgtacgtttccgcaagttcttggaaaacaaaggactatggtctgaagaagaagagaacaaagtgattgaacaggccaaagaagaaatcaaacaagctatcaaaaaggctgacggcgaatcaaaaccgaaagtaacagagctgattgagaatatgtttgaagagccgacgttcaacttgaaagaacaacttgaaatttacaaagcgaaggagtcgaagtaagccatggcgcaaatgacaatgattcaagcgatcactgatgcgttacgcacagaactgaaaaacaatgaaaacgttctgcttttcggggaagatgtaggcgttgccggaggcgtattccgtgcaactgaaggccttcaaaaagaattcggtgaggaccgcgtatttgacacgccgcttgctgaatccggtatcggcggtctcgctctcggtttaggcctgcaagattaccgtcctgttatggaaatccaattcttcggattcgtatatgaagtaatggattcaatctcaggacaaatggctcgtctccgctaccgttccggcggacgctggacttctccggtgacaatccgttctccattcggcggaggggttcatacacctgaacttcacgctgacagtttggaaggccttatcgctcagcagccgggtattaaagttgttatcccttccactccttacgatgcaaaaggactgctgattgcctctatcagagacaatgatccggttgttttcttagagcatatgaaactttaccgttctttccgtcaggaagttcctgaggaggaatacacaattgagctaggcaaagctgatgtgaaacgcgaaggtactgacctttctatcatcacatacggcgcgatggttcatgagtcgcttaaggctgctgaagagcttgaaaaagaaggcgtttctgctgaagttatcgaccttcgcactgtaagtccgcttgatattgatacgattattgcttctgttgaaaaaacaggccgcgcaattgtcgtgcaagaagctcaaaaacaagccggcatcgctgccaacgttgtagctgaaatcaatgaccgcgcgattctgagcctggaagctccggttctgcgtgttgcggcgcctgatacagtatttcctttctcgcttgctgagagcgtatggcttccaaaccataaagacgttcttgaaactgcgaaaaaagttcttgaattttaatcaggcatcataaaagacggtaaagagagtccttttctcttatatgaaggagtctgtttactaggttcaatgcttgcgaatgcataactaaaatttgcttaatcaactaggaggtcgaaaactgtggcatttgaatttaaacttccggatatcggggaaggtatccacgaaggcgaaatcgtaaaatggtttgttaagccgaacgacgaggtagaagaagacgatgttctggctgaagtgcaaaatgataaagcagtggtagaaattccttcacctgttaaaggaaaagtattagaattaaaagttgaagagggaacagttgcaactgttggacaaacgattattacgtttgacgcacctggttacgaagatcttcaatttaaaggaagccatgattcaggagaggcgaaaactgaggctcaagttcagtcgtctgctgaagcagggcaggatatctctaaagaagagactcctaaagagcctgcaaaagaaaccggtgcaggacagcaggaccaagtggaagctgatccgaacaaacgcgtgatcgccatgccttccgtacgcaaatatgcccgtgaaaaaggcgtggatatccgtaaagtaacaggttcaggcaataacggacgtgttgtaaaagaagatatcgacagctttgcaaatggaggagcggctcaagaagcggcaccgcaagaaacagctgcacctcaggaaacagctaaacctgcagcggctcaggctcctgaaggcgaattccctgaaacacgcgaaaaaatgagcggtatccgtaaagcgatcgcgaaagcaatggtgaactctaagcatactgcaccgcacgtaactcttatggatgaagttgacgtaacaaatcttgttgctcaccgcaaacagttcaaacaagttgctgctgatcaaggcatcaagctgacttatctgccttacgtcgtcaaagcattaacatccgctttgaaaaaattccctgttttaaacacatctattgatgataaaacagatgaagtgatccaaaaacattacttcaacatcggaattgcagcggataccgaaaaaggcctgcttgtgccggtagtgaaaaatgccgaccgtaaagccgttttcgaaatctctgatgaaatcaacagccttgctacaaaagcgcgtgaaggcaagcttgcacctgcggaaatgaaaggcgcttcttgcacgatcacaaatatcggttctgccggaggccaatggttcacaccggttatcaaccatccagaggttgcgattctcggtatcggccgtattgctgaaaaagcaatcgtccgtgacggtgaaattgtagctgctcctgtcttagctctttctctcagctttgaccaccgtatgattgacggagcaactgcacaaaatgcgttaaaccacatcaagcgtttactgaacgatccacaacttattttaatggaggcgtaatgttatggtagtaggagatttccctattgaaacagatactcttgtgattggtgcgggacccggcggctatgtagctgccatccgcgctgctcagcttggacaaaaagtaacagtcgttgaaaaagcaactcttggaggcgtttgtctgaacgtcggctgtattccttcaaaagcgctcatcaatgcaggccatcgttacgagaatgcaaaacattcagatgacatggggatcactgctgagaacgtaacggttgactttacaaaagtccaagaatggaaagcttctgttgtaaataagcttaccggcggtgttgcaggtcttttaaaaggaaataaagtggacgttataaaaggggaagcttatttcgtagacagcaactctgtccgtgtaatggatgagaactctgcgcaaacatacacatttaaaaacgcaatcattgctaccggttctcgccctatcgaattgccaaacttcaaatatagcgaacgcgttctgaactctacaggcgcacttgcgcttaaagaaattccgaaaaagctcgttgttatcggcggcggatatatcggtactgagcttggaacagcgtatgcgaacttcggaactgaattggttattttagaaggcggagatgaaattcttcctggcttcgaaaaacaaatgagttctctcgttacccgcagactgaagaaaaaaggcaacgttgaaatccatacaagcgccatggctaaaggcgttgaggaaagacctgacggcgtaacagttacattcgaagtaaaaggcgaagaaaaaacggttgatgctgattacgtattaatcactgtcggacgccgtccgaacactgatgagctcggccttgagcaagtcggtatcgaaatgactgaccgcggtgtcattaaaacagacaagcagtgccgcacaaacgtaccgaacatttacgcaatcggtgacatcattgacggacctccattggctcacaaagcgtcttacgaaggtaaaatcgctgccgaagctatttcaggagagccggctgaaatcgattacctcggtattccggcggttgtattctctgagcctgaactggcttctgtcggttacactgaagcacaggcgaaagaagaaggcattgaagtcgttgcagctaagttcccgtttgcagcaaacggacgtgcgctgtctcttaacgaaactgacggcttcatgaagctgatcactcgtaaagaagacggtcttgtaatcggtgcgcaaattgccggcgcaagcgcttctgacatgatttctgaattgagcctggcgatcgaaggcggaatgactgctgaagatatcgcaatgacaattcacgctcacccgacattgggcgaaatcactatggaagctgccgaagtagcaatcggaagcccgatccatatcgtaaaataataatgcaacaaagaaacagcccccgtttgtaaaagcgggggctgtttttattgtgcaagcacatgctgcataggtttgatgatatcctcttttttctttacggatccctcaatcttcatgaccacatgccgatgattgatcaccatcagcgcagggaacgtgttgatttcctcttcccatccctttctgttgtcataaaccttcatttgatcgacatgatggggatatttcttttctaaatcaagaatcgcatcgtaataaggcacttctttatctatatgattttcatcggaaaaaaacaagatttgagtgtgatgaatgctgtcgatccggttttttgtgaatggactgacagtagaaaccgaacagcttgacagaacgaacagcatcaaaaaaaagggaatcaccgtacggtagcgcatctatcttactcctctgttttatataatatatgggttcatccatttataaggactatatcaagtgtatcacgagaggtgaaaaacctaaggcttgttactgaattgttatataattgaaaccgtttttaatgaagaaataatacgtgtgacaacttgcgcagccgatgtgtaaaaaaggcacattgtttttcgtgagagcgctgttttttcgttatactgggagcaaaaccatatcaggagggattgtcatgtataaagccgctgcagccgtcatatgtatgtgcttactcgccggctgccaatcaaatgaaaagatgcaaacaaacaaaccccattctcaagccgcggccaatcatgccaaacgggaaaaccaccatacaaaagaggaaaaacagaaaaaacagaaggcggagccccgttactatatcaatccgaatagcttttctgtggaaaaaatggatgaacagaaagagaaaaaaccgatcgcattggtaacgatcgatgacgcgcctgatcagcatgccgctgagattgcggacaaactgcacgatctcaatgcgtcagcgatcttttttgtaaacggacattttttgaaaaaagatgaaaataagaaagcgcttaagcatattcatgagttaggttttatgatcggtaatcatacaatgactcatcaaaacttaaaagatctttccgaacaaaaacaacgggaagaaatcatcggcgtcaataaagcggttgaaaagataataggagagaaacccgcatttttcagggcgcctttcggaagcaatacggactacagtgacagacttataaaaaaagaaggtatggtgaaaatgaactggaccttcgggtatgattgggatcagaaatatcaatccaaaaaagcgcttaccgatatcacactgaacagtccttatctgcgggacggggccaacatattgatgcatgaccggaaatggacggcggaagccatgccggacattgtaaaaggattgcgtcataaaggatatactgtgattgaccctcgagctataaaaagaccgtaaaaaataaatgtgttatacaatttatcagttgacatattaaatgtgacataataatataataacaacaagtgaaaattaagcgttttcaaattctgagaaatggggaatgacagatgggtacaattgtttgccaagactgtaacgaagcgattcattactttgaggatgagaaggtcacgacgttatacggaacatgctgcggacaatgccagtgtcatcttgaagaagagtaaaaagcgtaaaaaggcccgaaacgatttcgtttcgggcatctttatgtttattggatggctttttgctctttgatgactctgatcatttcaagcgttgcatcttcgggaccctgcacaggaaggccggcgtccaagtttttaaaaatgtagctgatattttcttcagtaatgatctcacccggaataaagatcggaattcccggcgggtacaccatgacaaactctgcgatgatccgtcccgcggattcttttaacggaatgacttccgtatttgcgtaaaacgcgtctcttggcgtcatcgctaacagaggaatttcaggaagcagaacttcggtttgctgatgagcatagtcattgtcggaagcctgctttgaaatgtctgtaagcgcgcttacaagacggtcggcatctcccgctctgtcgccgggggtgaaaatacataaaatattatacaaatcggacagctcgacttcgatattatatgattcgcggagccatttttcaacgtcatgacccgtcagtccgaggtttttgaccgaaatgattaatttagtcggatcataactgaatgcagctttagaccctgtgatttcttcgccgacacagcggatgccttcaatttgattgaggcgttcccgtgtctgatccgccagcagaatcgtatcttcaagaagatcgcggccttctgtagcgaggcgttttcttgcgacatcaagtgaagcgagaagcagataggatgttgacgttgtcgtcagcatgcttaaaatcgactgtactctttctttggaaacaagaccttctctcacatttaaaatggagctctgcgtcagggagcctcccaatttgtgcacgcttgtggctgccatatcagcgcccgcctgcatggcggacagaggaagcttatcatgaaaatgaatatgcacgccgtgcgcttcatcgacaagcacaggcacatcgaaagaatgcgcgagctttacaatgctgctcaagtcagctgccacaccgaagtacgtcggatttatgacaagcaggccttttgcgtcagggtgctccgtcaaagcccgctcggcggactcaagcgtaatgccgtgagaaattccgagctcatcgtcaatttccgggtgaataaaaatcggcaccgctccggaaaatacaatggccgacataatggatttatgaacgtttctagggatgatgattttatctccgggtccgcatacggccatgaccatcgtcataatggcgccgctcgtcccttgtacggaaaagaaggtatggtctgcgccgaatgcttccgcggccagatcctgggcttctttaatgatgccctttggcgcatgtaaatcatccaggggttcgatattaattaaatctatgcttaacgcgttttctccgataaattgtctgaattccggatccattcccgcgccttttttatggcccggaatgtggaattggacaggctgtctgtccgcgtgctttttcagtccgctgtacaggggtgtttcatgttgcggcaattgttttcccacctttatcataatacctacggattagtttgtattacattcagttttattacccgttttttaaacgtaaaacaaatgaattatattatgaacttgaaagaaagtaaagaacaatttatgatctatggaagatgcttattttgagcatgattataaaggagtgaagacatttggaatatcaatatccgatgaatgaggactggacgacagaggaggccgtggatgtcattgctttttttcagcaggtggaaaacgcctatgaaaaaggagctgaccgagacagacttctgaatgcgtaccgccgctttaaagaaatcgttcccgggaaagcggaagaaaagaaaatctgcagccaatttgaagctgacagcacctattccccgtatcggactgtgaaacaggcgaaacaatcagatcaagcgattatcaaaatgtagacaaagcgagccggcaatcggcccgctttttatgttatgagactttctgagtcagtgtgtataaaaaggaaagcttcctaaaagcatcttcaatggtttgcaggaattcattgttgttcatgttgatcacgtcttctttttgcagctgaatgccgcacaaaagctctgcttttttcactgtctgcagacgttcaaataatgttttcagctgctcctgatccatgtcggactgcttgtacgcccctggcttcgtatgatccggcgaccatacaaaatgaccgggaatctgttttgtgatgtcctcctgcttcgcttccagcaatctgccgtattcctcttttatcggagattcataaatgatggcaaaccatacaaacatatgggtgtcccataaaccgatctgaaagtgagggagtttcttatacccgcgtttgctgttggcaaaggcaacccagctgtcagccggcgggttgacagatcttctcgcgtgcttggcgacatgcgggaacatttcatcgcccgtcaatgctgacaatgtcggtgcgaaatgctctcctaacaaggtcagcttcgggcggacttgttcttttaacacctccatgcgcggatctaaaccttctattgtaaatgtatcgaagtcttcttttgtaaaacgcatctgagtcatctttttcctccttatcgtaagtattcatattttaccacagccgccgccggccgcaaaaacattgagaacgtttgagccgagaggattggtggtaaaaaacgaataggtaaacacacaattttaagaatgttgttacagccgaatataagtttccatacgatataagaagtatcattaataaattggaaaaatgggatgcttttttaacaaatgatctctggaaggggcgaaagacaatgaggcaagtggtgaaggaaggattcagggaggaaaaaaataaccgtgtagctgtctggagactagaggttgattatgaattggcaaccctgtatgaggccatgcaaaaagagaatgcagatcaaatcgatctcagcaaaagaaaactggaacgtctcagaaaagaatggattcggcttaacggataaagaatagtaaaaacgaaccgcaggaaatggttcgtttttacgtgagaaggcatttttttcattttccttgctttttcatcgcctttatcagtatgctatagaataagctatacatagaaaagaggtacacggtatgacaaattggacggaaattgatgatatcgcaaaacaatgggtaaaagaagccggaacgagaatcagacaatccatgcaggaaagcttgacgattgaaacaaaatcaaatccgaatgatttagtcacaaatattgataaagagacggagcgctttttcattgaccgtatacagggaacttttcccggacaccggattctcggagaagaagggcagggggataaactccgctcccttgacggaatcgtctggattattgatccgattgacggaacgatgaattttgtccatcaaaagcggcatttcgcgatctccatcggcatctttgaagacggaaaaggcaaaatcggcttaatttatgatgtgatgcaggacgaactgtatcacgcattcagcggaaaaggggcttatctgaacgacacgccgcttgctcctttaaaagaagcttccattgaagaagccattattgcaatcaatgccacatgggtgacggaaaacagaaggattgacccgagtattttggcgccgctcgtaaaacgggtcagaggaacgcgttcctacggttcggcggcacttgagctggccagtgttgcggccggccgcattgacgcatacattacgatgaggctcgcgccgtgggattacgctgccggctgcgtgctgctgaacgaagtcgggggcatttacacgaccacagacggcgaaccgtttacgtttttagacaaccacagcgtgcttgcgggcaatccggcaatacataaaattatctttgacgactatttacatgctgacaggtagagattttgaagaagaagatctcgggtttctggagcagctggcggcatcacacccggtgtggaaaaacgaagagttcggaacaaaaaatgcggcggagtttatgcttgcatactccatgtacaatggaacatggctcgtatgggagattgacggcgctcctgccgccgtcagttttcatttggaatgggcgccttcaaacggaaaaccgtggctcggaaccgtggccgtcgctccggaggcaaaagagaaaggaatcggacgcgcggtcattgaagagattgcgggccggctgagaggggagcataaagcgatgttttcagctgttcccctggacaggcaggaatgggttttgtttttaagccaatgcggctttgaacagcttaagcttgaaaaagacgatcgtgaaaagacatatatgatcatggtgaagccattgtgaaatgtttcagatataaaaaagagaccggatttctccggtctcttttcttgtttacaagccgaccgcattccaggccgcttctacgcttgcagcgtcttgagagccgtaaaggtcccgcgctgattgaatcaaagctgcttttgcatctttaaagtttgatgacggagtgagatataccgttagtgcgcgatagtaaatctgctccgcttttttcacgccgatttttgtaatcgtgttgtaagcggctttgttcggaattccgctgtttgtatgcacgccgccgtagtcgccggcatcagtgttcggaaggttttgataatttttgtaatggtcgggctgtccgtattttgtcggagtggataaactgcggagagccggctggctgaccgtaatatcttcaccgatatcccagtcctcagtatcattgaagtatccgaatacatcagagaaggattcgtttaaagcgcccggctgattttcatagttcaggttggctgtttcctgtgtaacaccgtgtgtcatttcatgggccgttacgtccattgaaccggaaagaggcgagaagaatgagccgtcaccgtcaccgtaaatcatttggtcgccgatccaggccgcgttattgtatttgctgccgtaatgaacggaagatacgattttgccgcctttattgtcgtagctattgcgtttaaacgtctgatagaaataatcgtacactttgccgagattgtaatgcgcatcaacggcagcgcgctgagaagaagttgtgaactggttggtagtgcttgatacgagtgtgcccggcaggttatattgtcggttttgcagatcgtacgtaataatttgcgttccggtaggtttagaaagatcacgcattacatatttgccgctttcagaagaaatatttaatgagaccgtttttcctttaagagtcgtacctgttccggttgcagcggcatgctccactttgttttgctttttcaggactttccctgtttccgcatcaacggttacttcccagttagctggttccggttcgatgtagcggatggttacatcataggcgaggcggtatttaccgtcttttgtggccgctgctttcagctcggctttgtttttgtttgtaacgttgccgttagagacggcttcaggtgatttgccgattgctttaaaagcatgatccagcgcctgatttgcagataattttttgctgtttgccgttttggcagaagcatcgttgtttaattcaccgttaatcgcatagacattgttggatttatcgacgtgaataatgacttgcgagtctttcacaggcacaccgttaacgacaggcacataacggaagtgcttgtagccgagatcatcggtcgtgtggtcaatcagcttcagtctctcagaagggttgcctttgaagactttgccgttttgtttcaagtattgcttgattgctttgtcactgactgaaggcaactcagactgcaccaaagaatgcttcggcacaaagttcgtcaggttttctttaagctgaggattctcagcggcctgaacacccggaagactgatagttaaactcataaaggaagcggcgacagcaacagacaatttcttacctaaacccacaataaatccccctttttgaaaataatgaaaacttatattgttataataaaccagcattctctcattctgcaatataaaactagactccgctgatgaattgatagaatcgtcccggaaaggcttccggcggccagcatcgggggataagccgagaggcacgtgttgaatcagacatgagtcgaatgatgcgatttattctgaaaaaaatgacaaatgaagtcgggaaaaatgataggggaaaaatgttccgatctgtaaaactttttttatagccgtttgtctaaatgggtgaggccttaataaacgaaaaggattgtttcagatgtcagagattttcagtcattttattcagcatttcgacagatatttcattttaagcagacagagcgtgttgatcattcagtggtcagccgtctgccttgctgttttatacgcgctgacttttcatccgaaaatcagccgtgagagagtttggttttattcaggaattctgtcagggccgtattattagcgggcataacagttgaattggttcatcaggtgcagagtacttactttagcgcgcactatttgatatcggaagaaagagagcttcttccgatcgttcatctcttaatgtatgggtatgtgctgctcaccgcgtttcactatatgctcatgacgcgggagcagaggggaaagggcatgttttatacgtttgatctcgctgtggtgacactgcccgtcattcagctgatcttcagctttttcactttctggaatatcagtcccgatgcgatggcgggggaggatatagtttcgatgctatgttttattacgattgttttacttctgctgatttctatgaatgttttattctttaaaatgtattggaaaccgagacctgtttttatcggagtgttttatgttggagtcatcgggctgttggtgtgggtgctcgctgcgccctcggcaggtgtaacaaaagattacggcagacttctcccatttacggtgtatttaacgatggccggttttctgatgacccatcatttatttcatcggtcagacaggatcagacagcggaagaaaagctttcttgcgggagcaacggccgctggttttattgtctttttgaatccggtatacaatgcgggagatgccgcttttgcggtttcaaagccaatggctgaagatactgttgaggatgttggtggacatatcacttcagaccaagcggaacggatccttacatcattttttccggcagagaatccgatttatttaacagaaaccaatcaggatctccattacttttaccgttttaaaacgaaagattatgaagcggaagtggacgaggtttcccgattgattacaaattaccaatatcttaaaaaaccggaaggccgcactttaacagaagaggaataccggaaaaagtcgctggatttcttgtcggcacacggccgaaaaataaaaacacaaggcattcagacaacagtgagaaaagaaaacggacagtttgtcgtggagattgcgccgaaaacacaagggacgaaacacgaagattcgggcacagtattttactgggaaaaagacaccattatgggtttttcagaagacccgtctatttatcagcttgagtcactgccgcaggtgcatatgacggaaaaagacatagtgaaagcatcaaaagccgcctttcgtacgcttcaaatgcctgatcagacatttgaaatcacaaatacagatataaacagcctgatcggcagcagtttgaccgtaactgcgaataacggaacggagctgatatttgatgcagtatccggacgtcttatgaaaatcagagtctcacctgacagcaccgttttaacaaaaacagaacttcagaagaagcttttttcattgctggacgcggatacttcaaagcttagacaaattgataaatcggaaggcaatctcgtttttgaaaactctgaaggcacattcgtttatacgctccggaatgaagaaggcatgaaagaggcctcattctacggacaggtaagtgccaaaacattcccgcatacatacagagacggacaaacagccttcaacaaagtggcggcagcttataacggcaccatttacaaaaagcgggtgaagcctgtcatagcggtgaaagacggcgtaacatataaagcatggctcgtcattattcagccgttcggttcaaaccgtcatgacgcatatgtagtgaacgcggatacttacgaggcggtgaacctttatgaacaataaagaaaaaaaggctgtcttcttcgatttatacgacctatataaggagggggaacttgaaggcggcacgctccagtggatgaaagaacatgagcatttattcggagctgaggcggaaaacagaaaagggcagtatgaacatggtttgaatgcgccgtccggcgatatccgccagattaaatacatgaaatgcctgacgtatggattgtacggattcttcattgtgctctcaatctggatgacagtgtggttttatttttaaatgaaaaacaagatgtcaattgaacagctgtatcgtgaacattatcaagatattatgtattacctttacagacgcacacatcatgctgagaccgctaaagacctcgctcaggatacatttatgaaagcatttaacgggcttgattcgtttaagggccattcgtctatcagaacgtggctctatgcaattgcgcatcataccttcatcaattggtacagacgtgatagaaaatatcaattttcagatatcaccctgaatgaagggcttcagcaaacaacatatgaactgccggagcattacgtcgcccggacagacactcagaatgcgctgaccgggcagattcagcgtctgaaaagcgatcagcagaccgttttaattttaagggaatttcaagagctgtcttacgaagagattgctgatgttttggactggagtctttcgaaggtgaagagcaccctgtacaaggcgagaatgcagctgaaacagcacttggcggaaaaaaggaaggacggacagatatgacttgctgtttagtgagagatttactccctttatatattgaaggcgattgtgaaacagaaacggagcggtttattttccgccatcttgaatcatgcggtaagtgcgggagtttatatcatatgatgaaggagccgcttgacctcggcagccctgagatgaaggcgccagcctgttatgcagaagaagaaaggcggtttaaggaacggtattacgggaaactgctgataaaagcagcctgtatgttcggcgctgttttctttatcatgctgatccttaaactgctgatttaaaaaaacgcccggctgaatgaccgggcgttttaatccgtttactcagccggatgaaaggctgtataaatgccttcaagcaattcctggggcagtgaattaaagaatccggcacacagctttgcttctttttttcctgctcctgctttttcagcaagttcctgatcaaatgtatacacaccgtcttcttcaatcagcgcagattgaaggatatgaagactttgggaaaaagcggtgaacagctgatcaacgataagggcctctttttccgtaaagccgagctccaccgctttttctttattaaatgtatattcgccgtccgttttctcaatacattgggaaagtacggttaaaaattcggttgaactgtcccacagcttttgaatgatctgggcttgttcttgatctaatcccaattcaaccgctttttcgccgtcaaaataatagataccgtctttttcgtaaatcgattggctgatgatgtcaatgagttttgccgcgtcttccggtgttttctctgcggaagcctgcaggacatgcggttcatttgcctgaatcgtttttgcgccggcagaatcaagcggactgaatgcaagcaaggcggctgagacggttgcggcggcagttacagcggttttcttcaaaaaaggtgttttcatttcgttctctccttgtcatgtgtatttgcttacagccacaagtataaaaagacaatgatggaattgaaataggaggtatggtattttctgcataacgatgccggactatttcagactgcatattctgagggaatctgctgatgtaactagaatgggagctgtcatttccggcttcctgactaggcggcgggggagataagccttacatctcagcctgttttgaggatgtaaaaaagcctgaatctttgattcaggcttcattagatattttctttccatgtttacggaattttgcaaagggtcatgcttttaatcaagcagtccctgttcgcgcatttttttctttacggtgaaaccgcttcccatcatggcgataacgagaacaatgcttccgatgatgccccatgcgcttttctcagcgattgatacgccgatcagcatcatgctgaagactgctgcgaatgcaaataataataagagccaattcaattttttcatatttccatcccctttaacgtcatactttcagtttacagaaaaacgtaacgcttttaaagaggatgtgtggtataatatgaaagttatctaatttttttaggagatgaaaatgtgaaacttcgaaacgatcttcgcaacatcgcgattattgcccacgttgaccatgggaaaacgactttggtagaccaattgcttcaccaagccggaacattccgtgccaacgaaaatattgccgaacgcgcaatggattcaaacgatcttgaacgtgaacgcggtattacaattcttgcgaaaaatactgcgattaactataaagatacacgcattaatattttggacactccgggacacgccgacttcggcggagaggtagaacggattatgaaaatggttgacggtgttctgttagtcgttgacgcatatgaaggctgcatgccgcaaacccgtttcgtactgaaaaaagctcttgagcagaacttaaatccggttgtcgtcgtaaacaaaatcgaccgtgatttcgcccgcccggaagaagtcattgatgaagtgcttgatttgttcatcgagcttgacgcaaacgaacaacagcttgagttccctgtcgtctacgcttctgcgattaacggaacggcaagtctggatccgaaaaagcaggacgaaaatatggaatcactgtatgaaacgattcttgaacatgtccctgccccggcagataacgccgaagagcctcttcaattccaagtggcgctgcttgattacaatgattatgtcggccgtatcggtatcggacgcgttttccgcggcacgatgaaagtgggtcagcaggtttcattgatgaaacttgacggaacggtaaaatcattccgcgtaacgaaaatcttcggtttccaaggattgaaacgcgtggaaattgaagaagcgagagcgggagacctcgttgccgtttcgggcatggaagacatcaacgtcggtgaaacggtttgtccggctgaccaccatgagccgctgccggttctgcgcattgatgagcctacgctccaaatgacatttgtcgtaaacaacagcccgtttgcaggccgtgaaggcaaatatgtcacagcccgcaaaattgaagagcgtctgaacgcgcagcttcaaacagacgtcagtcttcgtgtcgaaccgactgcatcacctgacgcatgggttgtttcaggacgcggtgagcttcacctgtccattttaattgaaaacatgcgccgtgaaggctatgagcttcaagtgtctaaacctgaagttatcattaaggaaatcgacggcgtaagctgcgagcctgttgagcgcgtgcagattgacgtgcctgaagagcataccggttctgttatggaatcaatgggtgcgagaaaaggcgaaatgcttgatatgattaataacggaaacggccaggtccgcctgatctttaccgtaccttcacgcggactcatcggctattctactgagtttctgtcactgacacgcggtttcggtatcctgaaccacacgtttgacagctatcagccgatgcaaaaaggccaagtcggaggccgacgtcagggtgtgctcgtttccatggaaaacggaaaagcgacatcttacggaattcaaggtattgaagaccgcggcgtcatcttcgttgagcccggaacagaagtatatgaaggcatgattgtcggcgaacataaccgtgacaatgaccttgtcgtcaatgtcagcaaaatgaaacagcagacaaacgtccgttccgctacgaaggatcaaacgactacgattaagaaagcgcgcattatgtcgctggaagaatcactcgagtacttaaacgaagatgaatactgtgaagtaacgccggaatccatccgtttaagaaagaaaatcctgaataaaaacgaacgtgaaaaagcggcgaaaaagaaaaaaacagcaggaatgtcttaatcacttgcagaatttgaaaaggtagaacccgaacggaaaaggggagggggatccttttgaatgaagtaagtgaacggctgtcgttctttgcggctctttaccaagtggatgagcatccgctgacgggaatgtggctgttatacggaacgatcgtcgtgctttcggtgattgtatttaaacttggctttgccaaacggctgccggtgttgaaggctgcggcagtttatctctttctcgtgctcggctgcaccgtactgacttttttcggtgtgtttctgccggtcggagaagggcttgttgtcgccgccttgattttgatcatttacaaaatccgtctgcaccagtccaaaaaaagccagtcagctaaaccgcaataaaaaaatgaccttgccttccggcgggtcattttttattcggtttattttttcagtttatcttttttcgctttttgtccgggatgaaaggaaaagtgtccggtattcagccgcgcctccgttttgactttgattcggtcatggcattcccggcacatatatgtatgaatcggacgattgcggaggcgtttggctgtcagtgtttcatcatcaatttgttcgattttgtcgcaaatggaacattttactctcattgatttttcacctctttcactatgacaagcattataacatggatgcccctcctgccaaagggaaagaaagcagcgcccttcctttggagcgggcgctgctttttaccggcggtttttcatatgatgatccgattgatcgttctgttcgttttgcagcttgttctggtctctttggttcagctgatcatcattcgattgagtcggtgattctttttcattgtcggtcacatcattcgggacttccggcatgacacggccgacgatggcggcaagttcgtccaaaatgcctgaaacggggcggccggccttaatgtcgctgcccatgcctctcagacgggaaaccgtatcaggatcagccacgacaacggcattggcgccgtaaggatcgttttttaacgcctgggcaaccgtgtatttaatgctctccactttgcttctttctaaattgtcatccacatcgataccgacaacggagtatcttccgagtacaaccgcggtggcatctgaaatgccggggattttttcggttacctcgacgagatgcttagcgatgtctgtccggccgggattttcagctgtctcaggagccgtatttttcacatggatcggttttgcatcgcgctgatcggctgattcgttctgaatattgcggccgcggccgtcctgtacagcagtgcagccggtaaggataaacaaggcttgtatgataatgaaaagaattcgcacgtcagatttcctccttgaatgctttcatttattttattgttgaattaaccttctatctttattcaccaaatcatatattttagcaggcatccccgttattcgcggaaagagaagcacacgatgggctttgatccttatttcaggaggctgagacttgagtaaaatttatgtgttagatacgaatgtacttttgcaggatcctaacgccattttttcctttgaagaaaacgaagttgtcatccccgccgtcgtgctggaagaggtcgattcaaaaaagcggtatatggacgaggtcgggaggaatgcgaggcacgtatctaagctgatagacgggctcagggagaaaggaaggctgcacgagaaagttccgcttgaaagcggaggaacgctcagaattgaactgaaccaccggtcatttcaccagctccaagaaatttttatcgaaaaaacgaatgataaccgcattttggcggtggcaaaaaatttaagccttgaggaggagacgaaagaaaacggccgcctcgtcatcctggtcagcaaagatgtgcttgtcagggtaaaggcggatgccatcgggcttttggcggaggactttttaaacgacagagtcgttgaccatgatgaaatatatagcgggtacaaagatatatttatgaataaagagcggtttgcctcgttttatagagacaaacaaatttcagtcaaggagcttcagcagcatcaggtttatccgaatcaatttgtgctgatgaaagatgaattaggaggatcttcgtctgcggtcggcatgacagataagaaaggcgagaccgtaaaaagactcgttttcgatgatgagcacgtatggggtatcaggccgaagaacgtccagcagacaatggcgcttgaactcctgctgagggaagatatcccgcttgtcaccctgatcggaaaagcgggaacgggaaaaaccttgcttgctctcgcggcagggcttctgcagacggaggatctcggtatttataaaaaactgatcgtcgcgcgtcccatcgtcccggtgggaaaggatatcggatatttgccgggcgaaaaagaggaaaagctcaagccgtggatgcagccgatctttgataatcttgaatttttattcaatgcgaaaaagccgggtgaacttgaagcgattttggcaggaatcggatcgattcaggtggaggcgctgacatacattcgggggagaagcattccggatcagtttattattattgatgaggctcagaatttgacgaggcacgaggtcaaaacgcttttgactcgggtgggagagggcagcaaaattgtcctgatgggcgatccggagcaaatagatcacccatacttagacagtttaaacaacggacttgcttatgttgtagaacggtttaaagaacaaaccgtctccggcagcgtgaagcttgtgaaaggtgagagatccggccttgcacagctcgccgccgatttgttataaaacttcgatttctgtgacgcccgttatcgggttttcaaagtctccgtccacgtaaaaatggaccgggccgccgtcttgaaggggtttccccgcatcgctgaaatgcgcgattgcgtccatcgccttttcgagcggcacttcggttctttctgattttgaaataaatgcgcacaggacagcgctttctttcggctcggcatttgctaaaacagcgccgagcttcatggcgaagctgccgttcatcagtctttctttttcataacgtttttcgctttttaaagtcggcggcgaaatgcgcccttctctgatcacccgttccggatcaagcgtatgctcctgggtttctgcagagccgtccggatgaacaggctgatttttttcaaacggaaacttacggtcatcgaaaatccagacactcggatcaattgtaatcgggtatgtaacattgccttttacttgaataacgctcatggtgaagcccccctttacttaaagtataaaagttttcgcatgaattgtcactttgcgtcgcaaattagatgtatacaacggcagcgaagtgaggatgatcgacatggtatgccggcattaccaagagctggacgcattagttcaagaagcgaaaaaaaggaccgaagaaggcaaagtggcagactatattccggctctggctgaatctgaacaagacagcctttcggtcacaatttatcatgcggaaaatacatgtctgacggcaggagacgccgaccggacatttacgctgcagagcatttcgaaagtgctttctctggcgctcgtactgatggattacggaaaggaaaaggtgttcagctgcgtgggtcaggagccgaccggcgacccgtttaattccatgattaagcttgaaacagtgaatccgggcaagcctttaaatccgatgattaatgcgggagctctcatcgttacgggtttcattaaagggcattcgccgaaagaccgcctggattacctgctcggattcatcagaagacttgcgaataatcaggacattacatattgcagacatgtcgcggaatcggaattcagttcatccatgattaatcgggccatgtgttattacatgaagcagtatgacatttttaaaggcgatgttgaagaggtcatggatttgtatacaaaacagtgcgcgattaagatgagcagtctggatttagccaaaatcggctgtgtattcgcccttgacggcaagcatccggaaaccggggagcaggtcattaaaaaagatgtggcgagaatctgcaagacgtttatggtgacatgcggcatgtacaatgcgagcggggaattcgcgattaaggtcggcattcccgctaaaagcggcgtttcgggagggatcatgggcatttcgccgtacaacttcggaatcggtatattcggcccggcgcttgatgaaaaaggcaacagcatcgcgggtgtgaagcttttggaaatcatgtctgagaaatacaggctgagtattttttgaaacatttttatcataacatctgcttaaatcctcttgcaatttcatctgataccctttatgataaatagaagaattaggtactcgcctggggaacggagggatacttttggcttcagagattatagttgaccatcagcagaaagcattcgagctgttgaagttagatgctgagaagattttgaagctgatccgagtacaaatggataacttaacgatgcctcaatgtcctctgtatgaagaggtcttggatactcagatgttcggactgtcgagggaaatcgattttgctgtccgcctgggattagttgacgaaaacgacggcaaagagctgctggacagacttgaaagagaactgtctgctttgcatgacgcgtttacaggaaaataaatgatcaaactcaaactatttaacggtttgggtttttttataaccgtaaaccgttttttttgcatcttcttttcgtaagacggtctcttaatctgcatttcatccgaaaaactataaagaaactgcgtaaaatgtttatgaattatagtaaaatataatacgcaataggtattaaacgtaagctttaagcaggaaagaggatgttatgtttaaaagaatgttaaaatcttacgattattcattgatatgcgctatcattctgctgtgctgtttcggattggtaatggtatacagctcaagcatgattaccgccgttatgcgttacggcgtgagcagcgactatttctttaaacggcagctgttcgccgtcatcgcggggtttgtgctgtttatcatcgcggccgtttttccgtacaaagtgttcgcccatcaaaagattcagaaattcatactgcttgcgtcagtggctgcgctttgcgcgctgtttgttttcggacatgttgccggaaacgcgcaaagctggtttaaaatcggcggaatggccattcagccgggggaatttgtcaagctgaccctgatactgtaccttgccgcggtatacgcaaagaaacaaagctacatcgatcagcttttgacgggggttgctccgccggtgatcgtcaccgtagtcatttgtgcgcttatcgccattcagcccgacttcggaacggcgatgattatcggtctgatcgcgttttgcgtcattatgtgttcgggattcagcggaaggaccctgctcaggctggtgctcatggcgggaatcgtattgctccttgtcagcccgatcatctatctgaaatgggacgatattttgacacccgggcgtatgagccggtttgaaagccttgaaaatccatttaaatacgccagcacatcaggcctgcagattataaattcgtattatgcgatcggctcaggcggttttttcggtctcggtcttggagaaggcattcaaaaatacggttatctgcctgaatcgcatacagactttattatggcggttatttcagaggagctcggcattttcggcgtcctgtttgtcattgtgctgctggcttttgtcgtgttaaaaggtttttatattgcgagaaaatgtgaagatccgttcgggagccttttggcaatcgggatatccagcatgattgcgattcagacctttatcaatctcggcggtgtcagcggcttaattccgattacaggtgttccgctgccgtttatcagctacgggggctcatcaatgttgttgttattaatgagcgccggtatattggtgaatgtcagcatgcatgtcaagtactcagaaaagaagaaaaagagggagcccgttccgtctaagggggtaaaaagacggcagacggaaaaatctgtgtatctctaaaaaacaagtgtatacacaggacggatattcctttattataaactacatatttattaggccaagggggagaaaagtttgtcacaacaatccatccaaaaagtgttagtagcaaacaggggagaaattgcgattcggattttccgggcgtgcacagaattgaacatcagaacggtagccgtttattcaaaagaagattcgggctcctatcatcgctataaagcggatgaagcttatcttgtgggagaaggcaaaaaaccgattgatgcgtatcttgatattgaagggattattgagatcgcaaaaagaaacggcgtagatgccattcatccgggctacggatttctctctgaaaatatccaatttgcgagacgctgtgaagaagagggcatcgtatttatcggaccgacgtcagcgcatttggatatgttcggagataaggtaaaggcgagggagcaggcagaaaaagccggcatccccgttattccggggagtgacggaccggctgaaacattaaaagatgtcgaacaattcgcaaaagtccacggatttccgtttattattaaagcatcgctcggaggcggaggccgcggaatgagaatcgtccgaaacgaaagcgaattgaaagaatcgtttgagcgggccaaatcagaagcgaaagccgcattcggaaacgatgaagtgtatgttgaaaaactgatcgaaaatcctaagcatattgaagttcaggtgatcggagataaagaaggcaatgtcgtccatctgtatgagcgggactgttccgttcagagacgccatcaaaaggtcattgaggtggcgcctagtgtatctttgcagcctgaattaagggacgaaatctgtgaagcggctgtggcgcttgcgaaaaatgtcggctatatcaacgcagggaccgtggagtttctcgtagcgggcggtgaattttactttattgaagtgaacccgcgcgtgcaagtggagcatacgattacggaaatgataacgggggttgatatcgttcagacgcaaatcctcgtggcgcagggccacggactgcacagccgtgccgtcaatatccctgagcagaaagacatttttacaaacgggtatgcgatacaatcacgtgtgaccactgaagatccgctgaatgactttatgcctgacacgggtaaaattatggcttaccgctcaggcggcggcttcggcgtccgccttgatacgggaaacagcttccagggcgccgtcatcacgccttattatgattcactgcttgtcaagctgtcgacatgggcgctgacgtttgaacaggcatcagcgaaaatggtccgcaacctgcaggaattcaggatcaggggcattaagaccaatattccgtttcttgaaaacgtggcaaagcatgaaaaattcctgacgggccaatatgacacatcgtttatcgacacaacgcctgagctgtttgttttcccaaaacagaaggaccgcggaacaaaaatgctttcctatatcggcaatgtcacggtgaacggttttccgggaatcgggaaaaaagaaaaacctgcatttgataagcctcagaccgttacgttaggtatcgaagaaaagccggcaagcggtacgaaacagatccttgaggaaagaggcgccgaggggcttgcagactgggtgaaagagcaaaaatccgtgctcctgaccgatacaacgttcagggatgcccatcagtccctgcttgcaacccggatcagatccaatgatttgaaaaaaatcgcgaatcctacggctgccctgtggcctgaactgttcagccttgaaatgtggggaggcgcgacatttgatgtagcgtaccgtttcttaaaagaagacccttggaaacgccttgaagatctccgcaaggaagtgccgaacacattgttccagatgctgcttcgttcatcaaatgccgtcggttatacaaactatccggacaatgtcatccaaaaatttgtccggcagtcagcggagtcaggtattgacgtattccggatctttgacagcctgaactgggtaaaagggatgacgctggccatcgatgccgtccgtgaaaccggaaaagtggcggaggctgcgatttgttacacgggagatattcttgataagacccggacgaaatatgatttgcaatattatctttctatggcgaaagagcttgaggcgtctggtgcgcacattctcggcattaaagacatggccggtcttttgaaacctcaagccgcatacgaacttatctcagcgctgaaggaaacgattgatattcccgttcatcttcacacgcatgatacgagcggcaatggcgtctttctctatgccaaagctgttgaagcgggtgtggacatcgtggatgtcgccgtcagctcaatggcgggtctgacttcacagccgagcgcaagcggattttatcatgcccttgaaggaaacagccgccgtcctgaaatggatgtccggcaggtggaaagactgtcgcaatactgggaatccgtccgtcaatattacagtgaatttgaaagcgggatgaagtctccgcatactgagatttataatcatgaaatgccgggcggccagtacagcaatctgcagcagcaggcaaaaggagtcggcctgggtgatcgctggaatgaggtgaaagacatgtacagcgtcgtcaaccgcatgttcggcgacgtcgtgaaagtaacaccttcttccaaagtcgtcggagacatggcgctttacatggtgcaaaacaatttaacagaacaagatgtttatgataaaggcgaaacgcttgattttccggattcagtcgttgagctctttaaagggcagatcggccagccgcacggcggatttccggaaaaactgcaaaagctcgttctgaaaggacagacgccgatcacggtaagaccgggtgagctgcttgaaccggtatcttttgaaggtattaaagaagaatggaaagaaacgcatcagatggaattgagtgatcaggacgcaatcgcgtatgctctttatccgaaggtgtttactgaatatgttaaaacggcggaacgcttcggtgatatttccgtattggacacaccgactttcttctacggcatgacactcggtgaagaaatcgaagtggaaattgagcgcggaaaaacgctgatcgtgaagcttgtatctatcggtgaaccgcagccagatgcgacacgtgtcgtttatttcgaattgaacggccagccgcgcgaggtggtcattaaagatgaaagcattaaatcgtccgtacaggaaaaattaaaagcagatcggacaaacccgagccacattgcggcatccatgccgggaaccgtcattaaattgttaacggaaaccggggcaaaggtgaataaaggcgatcatctgatgattaatgaagcgatgaaaatggagacgacggtacaggcgccgttctccgggacgatacagcagattcatgtgaaaaacggtgaaccgattcagacaggcgatttactgatcgaaattgaaaaagcgtaaaaaatgaacctaaaaaaacctgatccgcccccgtgtgcgatcaggttttttatgtgtaaaggccgaagctctaatgcttcggccttttcatgtgcctcagatgttccgctgttttgattcatagcggaagcgggcgattaataataagaaatagcataagacgccgaacaggccggcaataaagagcgaatgggcaagtgcaaagccggtggccatttctgaataaacaaccatgattccggagagcgcctgtaatacaacaaaggcaagagccgctatccagcccccaagaatctgtttttggtctttgtaagagcgcaccgcatgtgcaaaagcgacaagaatccatacgaacagaagcagcgctgccgttctgtggcccatctgcacccattcctgaaaatgggacggaagcccgtgattcagcctgctgcaaagcggaacgtcagggcaggcaaggcttgatttcgtatggcgtacataagcccccgtataaacgacgatatacgtgtaaatcgaaaggccgatcatatgaaactgcattcttctgccgattctgagcggcttgacgagctttttgtctgatttatcagcttcgaatatgagcagcgtcaaaatcagaacagaagcgaaagaaatcagcgatatgccgaaatgaagcgccataacgagcgcatttgatccgaaaacaaccgctaatgcgccgagaagcgcctgtaaaaataaaaagataatggacataatggcgagaaaggttgtttcacggaaaacaggcgtgacttttctccatgcccaaaaagcgagactcagcacgagaacgattgagacaccgcttgcgagtctgtggctccattcaatgatagaagcggcgttaagctccgggaaaaaccggccgtggcaaagcggccactgccttccgcatccgagacccgatcctgtctttgtgacaagagcgccgccgatcagcacgacgagcataacgaatgtcgtcagcacgccgagcgctttcaaagctttattcattttacattcaccttcttaacaaactggacaaaatgatatacgtaccaagtgtaagcgaatatgtgttttgtggcaattctcaattctgtttgttcacaaaaatataatagaatcaggacttcttagataatggggttgattattccagatgggtctgatagaaataaagtaaccgctttattatgaaaccggcggatttggtaaaattcataaaaagttcacaaataaattcctgtttctcgtttaatatttaagaggatgtttttttacaggtcattatcttgtatgatagagttgcaggtcttaaaaaacctgctttaggtttgtaagggaggtttacgttatggctaattccagaattttaaacgatacagctatagacggacagattgaagagacgacggcatggaaggatttcctttcgcttatcaaaataggaatcgtcaattcgaatttaattacgacttttaccggcatgtggcttgcgttacatatatccggtctgagttttttaggcaatttaaacaccgtgcttcttacattaataggatcttctttgatcatcgccggttcttgtgcggttaacaactattacgaccgtgatattgatcatttaatggaacgcacgaaagtaagaccgacggtaaccggaaagattcagccgaatcaagcgctgtggtcaggaattttactcattgctttaggacttatcatgcttttgatgaccaccgtgatggcagcagtcatcggttttatcggcgtgtttacgtacgttgttctttatacaatgtggacgaaacgccgttatacgattaatacggttgtcggaagcgtatcaggcgccgtgccgccgttaatcggctggacagcggttgaagggcacatcggtgttgtcgcgtgggttttattcatgattttattcatctggcagattccgcactttttagcgcttgcgattaaaaagacggaagattaccgagctgcgaatattccgatgcttccggtagtgcacggctttgaagtgacgaaaagacagattatcgtctgggtcgcatgcctgctgccgcttccgtttttcctcggcagtctcggtcttccgatcgtcattctcggcactttgctgaatgtcggatggcttgttctcggactgatgggattccgcatgaaaaacatcatgaagtgggcaactcttatgtttgtctattcgcttaattacatgaccatttattttgtagcgatggtggtctttacgctgttttaattgaataatgagcttgtttgatcgccaaaacaaacaatgacaactagtaaacgccgccttgaccttttgtttaatcaggcggctttgcttttatacatagatggaattttaagtaaaaaatctcatattttaagaaatgaggaaaagaagtatttcggctggaagcagatttactgcttgtgcatctcgtactgattcaaaaaaggggttgggtgaaatgttaaagcgttggcgtcttttatcattattagccttagtgccgcttttattgagcggctgtggaaaaccgtttctgtccacactcaagcctgccggcgaagtggctgataaacaatatgatctgacggtgctcagcacacttatcatggttgtcgtcgttgcggtcgtagcagttattttcttttacgtcattgtgagattcagacggtcgcgtgtaggggaagacacgataccgaaacaggtggaggggaaccgttttttagaaatcacctggaccgttattccgatcctgcttctgattattcttgtcattccggttgtcatcgatacattggcgctggcggatacgtcgccgatggataagaaaaaccgtaaagcagaggatgcgctcgtgattaatgtaagggcgaatttatactggtgggaattcgagtatcctgattacgggtttgtgacaagtcaggagctgatcgttcccacagatgaacgcgtctatttcaagctgaagtcctcagatgtgaaacactctttctggattccgtcagccgggggaaaaatcgatacgaatacggataatgacaatactttctttctgaccttcgattctaaacgcagcaaagaagcgggagaatatttcttcgggaaatgcgcagagctgtgcggaccttcacatgcgctgatggatttcaaagtgaaaccgctgccgtcaaaagaatttaaacaatggacgaaagcgatgaaaaattataagcatacaacagactccggtttagccgcgcaaggagaagagctgtttaaggaaaaaaactgcctgagctgtcatgcggttgagcccaatgataaacgggctgaagcggcaagaacggctccgaacctcgctaccttcggtgaacgggtcaaagtggccggcattaaggatgcgaataaagagaatataaaagcctggctgaaaaatccggacagcattaaaccgggcaataaaatgacaggcacttatccgaagctctcggacgctgaaacggatgcgctgtatgaatatttaaaagggctgaaagcggagaacaagtgaggacagggagatatcaggggggaggtcgtaaatgatgaatacgcttacaggacagcaaagaaaaagctctttgctttgggattatttgacgacggttgaccataagaaaatcgcgattttatatatgatcgccgggggatttttcttcgtcgtcggcggacttgaggccatgcttatcaggattcagctcttgaggccggggaacgattttatgggtgcgcagcagtttaatgaaattatgacgatgcacggcacgacaatgatcttcctggcggcgatgccgctgttattcgggctgatgaacgcggttgtgccccttcagatcggggcgcgtgacgtatcgttcccatttctgaatgcgctcggattttggctgtttttcttcggaggcatctttttgaatctgagctggtttttaggaggcgctcctgatgcaggctggacgtcgtacgcgtcgcttgcgctgaattcgaaagggcacggcatagactttttcgtgctcggcctgcaaatatcaggcttaggtacgctgattgcggggatcaactttctcgccacgattattaatatgagggcgccgggtttgacgtatatgagactgccgctgtttacgtggacgacatttgtggcgtcggcactcattttattcgcatttcctccgctcaccgtcggtttggcgctgatgatgctggatcgtttgttcggaacgaatttctttaatcctgaattgggcggcaatacgataatctgggagcatctgttttggattttcgggcatccggaagtatacattttaattcttcccgcctttgggattttttcagaaatcattcccgtatttgcgaggaaacgtctgttcggttattcatctatggtctttgcgatcgtgctgatcggctttctcgggttcatggtttgggttcaccatatgtttacgacgggactcggaccgatcgctaatgcgatatttgcggttgcgacgatggcgatcgcggtgcctaccggcattaaaattttcaactggcttttgaccatctggggaggaaacgtcaaattcactacgcctatgctgtatgccgtcgcctttattccttctttcgtactcggaggagtcacgggtgtcatgctggcggccgcagcggcagattatcagttccacgatacgtattttgtcgtagcgcatttccactatgtcattatcggcggcgttgtgttcggcatcctggcgggggtgcatttctggtggccgaaaatgttcgggaaggtgcttcatgaaacgatggggaaaatttcgttcgtcttattttttatcgggtttcatcttaccttcttcattcagcatttcctcggtttgatgggaatgccgcggcgagtttacacatatctgcccggccaggggcttgataccggcaacctgatcagttcaatcggcgcgtttttcatggcgggcgcggctgctttactcgtcgtcaatattatttatacctcaataaaggggaaatacgtcgggaacgacccgtggctggacggtcgtacgcttgaatgggcggtctcttcaccgccgccggaatataattttaaacagcttccgtttgtccggggacttgacccgctgtggattgaaaagcaggccggaaatgaagggatggcgcctgcagagcctgtagaggacattcatatgccgaacggatccatcatgccgtttatcatatctttcggtctgtttgtcgcagcgttcgggtttttataccactccgattattcatgggggcttccggttatcttcatagggctcggcatcacattctttaccatgctgcttcgctctgtggttgatgattacggctatcatattcacaaagaagatctgccgaatgatgataaaggggtgaaggcgtaatgcagctgcaggaaaaaatgacggctgaaacctttccggcttctcctgaaaaagcaacgctggaggggaaaaataagtttttgggattttggctgtttctcggcggggaaacggttctgttcgcctcgctatttgcaacattccttgctttacgggaatctaaagccggagggccgtcaacggctgagatgtttgagctgccgatcgtatttatcgcgacgatgcttcttttaacgagcagcttaacgagtgtgtatgcgatgtatcatatgaaaaatttctcctttaaaaaaatgcaggtgtggcttttggttaccgttttattgggagcaggatttttaggggtagaaatctatgaatttatgcattacactcacgaattcggctttaccattacaagctctgcgctcggctcagcgttttacacgctcgtcggcacacacggagcacacgtggcgttcgggctgttatggatcagcgcgctgatgatccgaaatgcgaaaagagggctcagcctttataatgcgccgaaatattatgtggccagcttatattggcattttatcgatgtcgtgtgggtctttatctttaccgttgtatatttgatggggatggtgggataacgatggacgataacaaaaacagagtgactgtcagtacggatctcgaatatcggaaaaagaaaaatgccgaggagatgaaatatcaggtcatatccttcggcttgatgatcggtcttacgcttgtcgcgtttttgacggtggctgcagacggcattgccggatggtttacgatgccgtttctgatcctgcttgcggtcatccaggtcatctttcagctgttttactttatgcatatgagccagaaggggcatgaagcgccgtcattatttctgtattcgggaatatttgtcgcgtttatcaccgtgcttgcatttgtcacgattatttggtggtaatcgggacggcggggagtgagagatttgattaatttggaaatgttcgggtttcgcgcaatgtggagcccgtatctgttttgtataactgccgtgataacaggtgtttacttttactggtgcagccggcataaaggacgtgtgtccgctaaggagaaggtgctgtttgtgctttccgcgctatttttttacgcggctgcgggaagtccggttgatttattgggccatgtgatgttcagcgcccatatgacgcagatggcggttctgtttttagtcgtaccgccgctgttgatttccggaattcccggctgggcatggaaaaaactgatcttccgtcctgtcgtaaagccgctgttttcgttcttttcaatgccgcttatcgcattagtgctgtttaacggtattttttcactgtatcacatcccgtttatatttgatttcgtcaaaacggattcgctgtatcacacgctgatgaacggactcatctttgtaacggcgttttttatgtggtggccgcttgtgcataaggtggacggtctgccccgtctcagcggtttaatgaagctggggtacattatggcagacgggattttgttaacgccggcctgcgcgctcattatgttcagcggggcgcccatgtatgccacgtatacagatccggcggcttgggccgaagcaatgaagctttgcgttcctttagatttgctggaggagatccctttatccgggccggagatgtttaacacgcttcctcctctggaagatcagcagcttggggcagtactgatgaaaatcattcaagaggcggtctacggaacatatttggctgtcatcttttttcagtgggtcagaacggaacgggaaaaagatacgctgtcagagccgccgtatatcgagcataccgtctcatgaaaaaaagtacagcagaatatgctgtacttttttattacatttgcactgtttttaataactcttccaattcaagcagtaaagctttgctttcagcgacgacatgttccggaaattcttcagcgctgccgtattctacgccgtgcggataataatgctttcctaaaagaggggccttcagctgaatcacggcccggctgccgccgacatcgccctcttttgccgttccttgaatccgcagataaaatgtcccctcaggtactgaaaactttttgtcgtaagtcactctttcataatcccattgtccagccagaatgagccctttaccttccatcagatcattcaagcggctgagctccgctgttaccccttcaagaccgctgttttcaaacttcaaaccttccccctccttttaaaaatgccctttcctgacaatcatagtatgaaagcgttacactttcaatgattcatacggtgaaagtatgcaaaaagaaaaatttgacgacaatagtagcagaaaaaaggaggaattccgcaatgacaaagatcaataagctcatgacgtcagacttgcaatattgtacagtattagataatgtatatgaagctgcggtgaagatgaaagacgcagatgtcggcgccattccgatagtggatgaagacggcgccacacttgtcgggatcgtgacagacagagatctcgtattacggggaattgcttcaaaaaagccgaactctcaaaaaataaccgacgcaatgacagagcgggttatcagtgcagaagaagacgcctctgtggaggaggtgctccatttgatggctgaacatcagctcagaagaattcccgtcacaaaggataaaaaactggtcggcattgttacgctcggcgatctttcgttggccgagcaatcaaatgagcaagcaggccgagtgctgtctgacatttctgaagacggcggtccggaggggtttatccattaaacataaatcacggacgatgcaaataggctgtactgtataagagtaaacaaaaacagaacggtttgaacatatgggggtgagaggttgaaaaatatcgcaagggctctcgttatccttttgcttatttacggagcgtatgttctgtttatacaatatggatcggctcctcagaaaaagacggatcaggaggagcctcaggtttccaatgaagaagagagcggaaaacggctgaaaatgccgtcatccggactgctttctctcatggggaaatctgccgccgatgtgaaaaagaaacttggggaaccgtcccggaaagatccttctgcctacgattacgagtggtgggtgtacaaccaggggaaagaccaatacgtacaagtcggtattttgaatgataaagccgtgactttatacgcttcgggaagcggcatcaacgcaaaaccgtttaagatcggcgaatcgacgggcgaagtttttaaaacgactcaggtttctccttttgtcaatgtgactgacaagggaaacacgtatcggttcgagttttctgaagaagatatcaatacccgtcccaccgtcaagataggcggaatgtatgttcagctgtacatggacaaatttgacgggaatctgtcaagcatcagggcatttgatgcggaaacacttgtgaaacaaaggccgtatgaagtcatgtacagaggaaagctgacagaacccgagcctgtttctgataaaaaatggaacgacattgaacgagcgagtgaacagcagattctcgatattacaaatgtcatccgcgtgaaacacggacttgcaaggctgaaatgggacgaaggcgccgcaaaagtggcattcggccacagcaaggacatgaaggataacaagtatttctctcacgtctcaaagaaatacgggactctgaaggaccgcttggaaaaaggcgatgtgaaataccgggaggccggtgaaaatattgcctacaactatgtggacggtcctgcagccgtggagggctggctgaacagcgaaggccacagaaaggcgctgttaagcccggattatacgcacctcggtgtcggcgttgatcagaagtattatacgcaaaacttcattaagccttggcagtaaaaaaccgcagaggggcgcgtcccccgcggtttttttatgttttttcgcgagcggcgctcctgctgaaaaaaatatacctgctttttttcgcaatttaggcgaacattaaggcgcatgaaccgatacattatagcaggcaaaacttttcggagggggtgagaattgtggcgaatcagcaatcacggcaatcaatcgatgattttaaacaattcgtaaaaaagcatcccaaactgatccaaaatgttcgcaaggaacaaagaagctggcaggaagtctatgaaaattgggttcttctgggcgaggatgatccgatatggaacccttttaaagacgaggccgttcagccttcttccgacgcggaaaccaaacaggaaccagctgaaaaaaacgatttcgtttcaaaaatggtcactgccgtcaaaaagatggatatcaaccaaatgaatgagcagatcaataaaatgagccaatccatttcatcattgcaaagccttttaagccaattttcggggagcagcacgaagcagccccggcaaggctccggacaacatcctttttcgttcagaaaggattaaagaaggggatcgtgtatgcgaaaagaggttcaggaattcatatccgcagatgaggaacggaaacggtttatacggcagcgtcccgtctggtaccgcagacttgcgagaaaaccggacgatctcaattcctttcagcttgacatgatgaatttttatgaaaagacgataccgcatcgggtaagccaattctcaaacgggattcaaatggcgcagatgatgatgcagatggttcacgccatgcgttcacaggattaaaaagcgtttaaacgccgcattttccaattgggtggtttcatggtaaactagcaactggaggtgcgtatttatgtatgcaacaattgagtccgtcaagcttcaaagtgaagcggagcagcttgccggcatgattctgcagtctgagacggctgaaaattaccgcgattgttacaagcgtctccgtgaagatgaagaggcagggcggatcattcgttcttttatgagcgttaaagagcagtatgaggatgtgcagcgttttggcaaataccatcctgattatagagagatttcccgcaaaatgagagaaatgaagcgggaactggatttaaacgataaggtggccgaatttaaaaaagcggagactgagcttcagtcgctgcttgacgagatcagcattgaactcggaacggccgtctcggagcatgtaaaagttccgacggggaatccttattttgacggcctgtcatcctgcggcggcgggtgcggttccggcggcggctgcggatgcaaagtttcctgacgagacggccgtctcgtcttttacataaaatgaacagaaagtcaggcgggtgatcatgatggaaaataagcgccaaggcataatcgtatatctgcattccttaaaacacagcaaaatgctgagaaaattcggcaacgttcattatgtttccaagcggctgaaatacgttgtgctgtattgcgatatggacctaatcgaaaaaacaatggaaaagatttcttcttattcttatgtgaagaaggtagagccttcttataaaccttttttaaagctggaatttgaatcaaagcttgataaggcgaaagagtacgattataaagtcggtatataaaaaaatccccgcagatacctgcggggtccttctattccttaacaagttaaggagaaggaaaagggagaggagaaaccggaggaagaacttatggggaaacgtaagtcttctccgcggttggcaacaacatcattcattgatgctgttacacgtagtcttgacaggaatgtgaatatgtatacacgtttttcacgttcattgtttgaaagaatgctttatgataagatagggattgttttgatacataacggctcagccgatgagaaacatcaaagttttcagaaaaagtggtgtgaataatgagagtaatttccggttcaagaaaaggacgagccttaaaggctgtgccgggcacatcaacaaggccgacgacggataaagtaaaagagtctatttttaatatgatcggcccgtattttgacggaggaacggggctggatttgtttgcggggagcggcggtctcgggattgaagcgctgtcgcgcggatttgaccgctgtatctttgtggatcgtgatttcaaagccatccaaacggtaaaagcgaatatcaaagcgcttgatctgctgtcatcagcggaagtataccgcaatgaagcagagcgggccctctatgccgcggcgaaacgggaaaaaggttttgacggaattttcttagatcctccgtataaggaacaaaagctgaaagcgcttatcgaaatgattgatgagcagaacatgctgaatgaagacggttttgtcgtagccgagcatgataaagccgttgcgcttcctgaagccgtcggcgcgctttctgtaacaagaagggaaatttacgggcttacaggagtgacgatataccgaaatagggggtaatgatgtggcaagtatagctgtatgtcccggaagttttgatcccgtcacctacggacatctggacattatcagacggggggcaaacgtgtttgagcaggtgtacgtatgcgtgctcaataattcttctaagcagccgctgtttacagttgaggaacgatgtgagctgttaagagaagtgacaaaagacataccgaatgttacggtcgagacgtcacagggactgttaatcgactatgcgaaaaaaaagcgggcgaaggcgattatcagggggctcagagccgtttctgacttcgaatatgagatgcaggggacttccgtcaaccgcgtgctcgacgaatcaatagaaactttttttatgatgacgaacaatcagtactcttttttaagttcaagcatcgtaaaagaagtcgcaaaatataacgggcctgtttcagagtttgttcctccggaagttgaacaggcgctgatgcagaaatttaaaggatgagaagcgctgattggcgtctcatcctttttttgtccgtgctgacagcttgtaacaataaatcaatgcgtatacggcgagagctgtcagcgtgatggcgggaccggtttcaacaagtgtattccatccgctgacggcagcagataccgcgtcctgatcgcggaaagggaggaatacggactggtaaggttcgtccaatgcaaggtaaagcggcttccacagtaagagaataaagagtgcggcataaatgccctgaaggatacgcgccgcgaaaaacggtttaaagcggatatctgtttccgataaaatgccggctacctgggcctgtacggaaaggccgctgaacccgagaataaaactcacaatcatggctttcggcagcaaggcggcatcagcttcactgaccagcttgctcccaagtgtaatttcaaacattccgctgataagagggatgtccagatttgccggaagatgaaaaagcgaaagcagcgcgtttgtaaatacagaaagcacatccatgacttgtacgattgataataaccggctgaaaaccgaaaacaatataataaaaccgcccaccatcagcaaggtttgtacagaagaggtgacggcgtcgcccaaaatttttccgagcggccgcttttccgaaagccgcgccttgtggagggccagaaatgcttccttcagagaagggagagcgatcgtctttttaccggtatacgccgcttcttctttccgtccgtatgaacgcatcgtcaggccgacggcgatgtttccgagatagtgagccgatgccagcagaatgccgagagacgcgttatgaaaaaagccgactgccacagcagcgaatataaataacggattggatgaattggtaaaagagacgaggcgttcagcctctactctggagatttgtttatcctggcgcagccgtgcagtcagcttcgcgccggccggattgcctgaagccatgcccatagccagtacaaatccgccgacccccggcactctgaaaatgggacgcataaagggttcgagtaaaaggccgacaaacttgacaatgccgaatccgattaaaagctcagatagaataaaaaacggaagcaatgaaggaaaaactacctcccaccacatggaaagaccggttttggaggcttcgaatgaggcctgagggtgtgaaataaccgtagccgtcaaaaaaatgaaaaacaatgaaatcaaaaatgtatgaaacttagacaaattcattcttacctccccgatgctaaaattgcacactgacatttatatcatgataaaatatagaacagaccttaaaggcggccgggcaagtacctatttgtcatcctgtactaatatacgagcataggggttcaatttagaccatagaattcatgtataggatgtctattagggggttcgtcgcgttggccaaacctacaatcgggttagcgttaggttcgggaggggcaagaggcatcgctcatctcggagtgttatccagtttacataagcatcagattccaattgatatgattgccggcagcagcatgggagcattagtcggaagcttttatgcggccgggcatgacgtggccacgatgaaaaaagtcgctaaagcatttaagcggcggctgtacgcggattatacgatgccgaagctcggatttttaaaaggagaccgcatcaggcagctcgttcatgcctatacgtacggcaagccgatagaagaactgcggatcccgctcggcatcgtggcctgcgaccttcagaccggcgaaaaactcgtttttacgaaaggttcagtgtccgaagccgtccgcgcgagcatcagcataccgggcgttttcgtcccgcaaaaaatgaacggacgtatgttagtcgacggcgcggtggtcgacagaatcccggtttccgccgtaaaagatatgggtgctgatatcgtcatcgcctctgacgtatcccgggtgaaaaaaacggaaaaggcggcacatatttttgatgtaatcatgcaaagtatggatatactgcaaaatgaattggtccgtcaccagaccattgccgcagacgtcatgatccgcccttctcttgaatcattcagctcaagttcttttgccaacattgatcatatgatcacagcgggcgaagaagccgcagaccggatgatcggccggattaaacaagaaatagagaactgggagggctaactcatatgaaagcaaaacattttcgctgggtgtttatcatcctgatcttattaatcgctgttacatttattaagcttccgtattacatcacacagccgggagaagcatcagagctgagaccgctgattaaggtggacggaggctatcctgaaaaaggaagcctttccttgatgactgtcaaagtaggccccgccaatccgtatacatatctttgggcgaaagtgcatccttacgaagaaatcgtccctgatgaaagcataaaagaagagggcgaatcggactcggattatatgaagcgccagctgcaaatgatgaaaagctcccaagaaaacgcggtcattgccgcttatcaaaaagccgggaaacaggtgaaatactcatttaacggaatttatgccagctcagtcgtctctgacatgccggcaaaaggaaaaatagaggtcggtgataaaatcatcagcgcggacgggaaaacatacgaatccgctgaaaagctgattgattatatcagcagcaaaaaagcagggggaaaagtaacgtttcacattgaacgggacacgaaagaaaagaccgttgacattgtgctgaaatcattcccggacgacccgaaaagagcgggaatcggtgtcgcattatatacggaccggaacgtgaaagtgaagccggatcttcatttcagcattgaaaacatcggcgggccttctgcgggtctcatgatgtctttagaaatttacaaccagctgacaaaacctgacgaaacaaaaggctataatatagccggaacggggacaatcgacgtggacggcaaagtcggaccgatcggcggaatcgatcagaaagtcgtcgccgcagacaaagcgggaaaagatattttctttgcgccgaatcaaaacggagctgaaaattctgattacaaaaatgcggtaaaaacggcgaaagcaatcaagtccgatatgaaaatcgtccctgtcgacaccatgcaggacgcacttgactatttggatcagctgaaagtaaaaagcacctgatacagacaggtgctttttttacgcattcaaaaaacgcttttcgtcttcatcatagcggatcggcgcttgtgaaaattcctgtttctcaaacaatgtgcgttcaggttcgtttatcggcaggctgtaaacccgtcccgccagtatgtccagatccagagcgggatgagagaaagaagagagcttgctgacgagaggtgcggtaagctcttttttctttgccgacaggtacgcctgtccttttttcgtcattccgagaagacggatataaggagcgcttgaaggctttaagagccgatgcatgtcttcttttttcgtccgtgtcagaatgtgcgtgtttatccgctgcagcctcgtccacgtgtatcgttttgttttcaatcgttccatcatttcgcgataggatcgggcttgtctgatggtgcgcagaattctgtgctcaaggccttcttccacttcatagattcggctcaattcttcagcggaaagagtgctgaggctgtattttacatatgaaaaatagtcttccgtgctgtgccatatgccgtatgaatttctgtatgcctccagctcacgcgcagacgcttccgggagaaagctccttgcggccgccgttcctttttctatcagcgctttccggatgcttgttgcgctggctatccggctgttatctccgggaagctcggcgtcatgatattgggaagcgattctggctgtcgtataaggcttcatagcggaatcggaggtgtgtatcgctctaacgtagtgaaaaccgagaatattgttcggcttggacaaatcgagcatgtcccgccctttgaatatgtgtgaaaaagcttttgaggcggcggccggatagctgagaccctttttcagctcctctttcagaatcaggctgcagtcatcttcctttcggctgaacgcttcagacgcttcaagaaaggattcgatccgcccgttttcgctgccgaaaaacaagctgctgcatcctaaatgatgaagaagcgaaacgctgccgcgcgcgaataattccgctttttgtacggcatatatataagggagctcaatgacgatatccacgccgttttccagcgccatttttgtccgggcccactttgagacggcggccggttccccgcgctgcaaaaaagggccgctcatcaccgccgccgcgacgctgctgtccgttttgatttttgcttgttccgcatgatagcggtgtccgttatgaaagggattatattcaacaaccaggccgactgctttcatatttgtcccgcctttcttgctatgttttgcttcgtgtggtacatttgcaaatgaagtgcatattttagtccgtttcgtttagtgtatgcatagcctatccggctgtcaacgattgcatgacggcggcattatgctgtaaagaaaaaatattgacaaaaacattctgaaaagctataatcatgtttgttgctttcctgaggtgatacaaatgaaatggacgatttatcagcttcatcaaatggcgaaaaagagctttgaatttgatgaaacagttgagttaaatgagctgacaaaattgaattctgacatccgccgcatttctcccgtccgggtgaagggccgcgcggagattgaatccaagcaagtttcgtttgactttacgatttcaggcgaaatggttttgccgtgctcaagaactttagttgatgtgccgtatccatttacaatcgcgacaaaagaactgtttagatttcataagtcggatgatatagaagatgaggacgttcattttgctgaagacgataccgtcgacttaactccgatcataaaagaagagattcttttagaaattcctatgcaagtcttttgtgaaactgaacaaaaagaaggagccgctccccaagtggggaaagattggcaagtgatttctgaggaagacaagaaaaatcaaatcgaccccagacttgcggatctgaaaaagctcttaacacaagatgatgaatcttaactctttaaggaggtgggaataatggctgtaccttttagaagaacttctaaaatgaaaaaaagattgcgccgtacacatttcaaactaaatgtacctggtatgacagaatgcccgtcatgcggagagatgaaattgtctcaccgtgtatgtaaagcatgcggatcatacaacggcaaagacataaatgttaaaagcaattaatgtatgaagaaaagcgcgggaatctcggttcctgcgcttttcttttttttgcccctccagcctgctcccgccgaaaaaattgtgagccccagtagtctatctaatctatcagcggcatatgtatgaggtaaatgagcaaatatggagggagatacgattgacgataacgagacaagacgcgtggacgcaagatgaagatttgctgctggcagaagtggtgctcaggcatattcgggaaggcgggacccagctttccgcttttgaagaagtcggcagagcgctgacgagaacggctgccgcctgcgggttcagatggaattcttatgtcagaaaacaatatcagtcagggatagaactggcgaaaaaacagcggaaggaattaagaaagcagatcggggtgcattccgccaatctgccgggaaccgtcaaacagcctccgatccgcagggctgaaggagaaaaagagctgtccattgatgatgtcattttgtttctgcagcaatttaaagagtcgccagccgcagcggatatgcgtcatgaaaaagaaaaactcacagaacagctgaccgcgctgcaaaaagaagtcgaggatctgcgtgaggaaaatgaaagcttgagaaacaagctggagatgacggaagaagattataaagcgttaattgatattatggacagagcgagaaggatggtcaattcaaaagaagacgacagaaaatcggcgcagagcctgtaaaatgaaccggcctgggggcggcgccccgccggttttttattatgccgtttctccggatgtcatttcaccgtccatatcgggatgccagatataaggattttctcctttatcacgcgccatatcatatttaacgggctcaaaattcatcttatcccagaaatctgctgatttcatgcgtgaattcgtcctgatcggcattctgaaggattttgcaaaatcaacaagcgcttttccgtatccgttgttttgatagcccggaagaacctcaagcttccaaagttccaaaaagtcctgacggtgatcaaaatacggattcgcgcctccgtttacctgatataaactcattctcgccactagtttatccccgaagtaaatcccgtaaaaaggcgaggtgctgtcattttcaatgatattatcctgaagatcttcaagcatcgacagctcctgcatcccgtattccttaaaccttttaaattcttcgagtgtcttaaagttgatgagcagtcgctctattttcaacacaaactccccctttgttgtgttctaccattattgtaaacgctttaattgaaaattccaactataatatgcttgccagtctttttgctcaaaacgaaattgaagtaatttgcggcggcttctgctatgataatatggaaaaatgcagatatagggtgtgacagtgtgaaaatcggaattatcggcggcggagcggtaggccttttatgtgcttactacttatcgtcccgccatcaggtaacggtcattacgcggcggacggagcaggctgatgcgattaactcaggcggtatacggcttttgaaagacggaatagaatgtacggcggcatgcagagcgcaaacaggcatcacttccggattcgacctcttaatcgcagccgttaaacagcaccagctaagtgctgtgttgcgggatcttgagacgataaaagggacgaatgtgctgtttttgcaaaacggcatgggacacatacacgacattaaagattggcatacggatcattcgctttatgtcggcactgttgagcacggagcaaaaaagatatcagatcatgccgttgaacatacgggagcgggagccgtaagatggagtgtattcagcgcatcccggccggaaacgctccaaagcatcttttccggcatgcaccgggattttcccgtatatgatgaaaacgactggtatcggcttttaacgggaaaactgatcataaatgtatgcatcaacccgttaactgcattgctgcgcgtgaaaaacggagagctggtaacaaatgacgcttacaaaaaatatatgagaaacgtgtttgaagaagcggagacaatacttggcctcgccgatagagaaaaagcgtggaacaaggtttgcgaagtttgcagactgacggaaaaaaatcattcctccatgctcgtcgatatcatggcaggcaggcggacagaggccgatgcgattatcggctaccttgtaaaagaagcggaaagccgcggattgccggccgttcatctcccatttttacaccgcagcataaaagcgttagaaagaaactgaaacaaagtcttttgaggttttccggtaacatgctatactcatttcggaaacctaactatttattggagaaaggaagttccagacagatgcagctaactgaactttccatcaaaagtcaaaataagtttgtgcagcactatatagatggagaaaacatgtcttcattttttgattatgatattcattcagaggacgtatggcaaaagcggcttcatgacctgtcttcgcggccgtttgccagagaagaattagcggattatttatcctcctatcacgaaaaatttcactccgccgccatgcaggcctccatcgaaaaactgagagatccaaaaagcgcagcggtagtaggcggccagcaggccggtcttttaacggggcctctttacaccatacataaaattatctccattatcgtacttgccagacagcaggaagaggcgttgcagattcctgtcgttccgattttctgggtggcgggtgaagatcacgatctggaagaaatcaattttgtgcatacgtcaacagagaataaaggtccggtgaaacagaaactgccgcagtcgtactggaaaaaaacatcggcggctaaaaccgagcttgatcaggaaaaatgcgcggcttggattgatgaagtgttcgctgcttttgaggagacggatcacacaaacacactccttcaaaacgtgaagcgatgtttacgctcatcagagacattcacggacttttttgaactgttgatcgccgacttgtttcaagaagaaggccttattctgatgaattcgggagatccggggattaaaaagctggaaacgggtatgtttcagcagattttaaaacacaatcatgagcttgccaaagccgtgtcagaccagcagcgtcttatgcgggaagccggttatcacccgattattgaatcggacaaagatcaggccaatctgttttacgaacacgagggagagcgtttcttaattgaaaaagaaaacggcgtttttgtcattaaggagcttgatctgaagtggacgaacgacgagcttcatacccatatggaagaaaaaccggaatgtttcagcaataacgttgtgacaaggccgcttatgcaggagtttctcatcccgactctggcgtttatcgcgggaccgggggagatcaattattggggtgagctgaagcgggctttctcattaatgggctttcgcatgaccccggtaatgccgagactgaacattacgattttagagcgccatattgaaaagaagctttcagaacggaatatcccgcttcaggaagcgatcgaacacggcaccggacacctgaaagacacttattttgaagagcagattccggaagagttttcttctgtaatggaacaggcgaagtcgcagattgaagctgtccataaacgcgcaagggacgaagcgctgaaggtcgattcaagccttgagccgctcttacagaagaatgccgccttcattcaagatcagctcttgtttttagaacggacggtaacgaaaagaattgaagaaaaagaaggctttgtgctgcgtgactatgaaagaatccaaaacagcatcagaccgctcggcgctccgcaggaacggatttggaatgtgatgtattatctgaaccgctacggtccaaaattcttcacaaccttcaaacatctgccattttcttttcaaaaccaacatcagattgtcaaactttgaaataaagttttaaagaaccctgaatagttcagggtttttttttatgtgtaaacagtgtaaaatgaggttgtggagagaagtggcggatagtggtgagtttaggggagaaagtgggggtccttatcatgtttatgggtgaataccggcatactgttgatgcaaagggccgcatgatcgtacccgcaaaattcagagaaggcctcggtgagcagtttgtgctgacaagaggacttgaccaatgccttttcggctatccgatgaatgaatggaagctgattgaagaaaagctgaaggctctgccgctcaccaaaaaagacgcccgcgcatttacccgattctttttttccggtgcgaccgaatgcgaactggacaagcagggaagggttaatattgcgtcatctcttctgaattacgcaaaactggaaaaagaatgtgttgtcatcggggtttccaatcgaattgaattgtggagtaaggtaatatgggaacaatacacagaagagcaagaagattcattcgctgaaattgctgaaaacatgattggatttgatatataatggatcttcgtgcatcacaacaacaactgacaattcaattcatttctgataaaggtgggaccgacacaaatgtttcagcataagacagtacttcttcgtgaaaccgtcgacggtttaaatatcaaaccggacggaacctatgtggactgcacccttggcggcgccgggcacagtacatatttattgcagcaattatcggaaaaaggacgcttgatcgcctttgatcaagatgacacggcacttgaaaacgcaaagaaaacattgtccgaatacaaaggacagctcattctggtgaaaagcaactttcgttatttaaaagagtgtttacatgaacacggcattacgagtgtcgacggaattctatttgatttaggagtatcctctccgcagcttgatacaccggaacggggattcagctatcatcatgacgcaccgctggacatgaggatggaccagtcggccgcccttacggcgaaagaagtcgtaaatgaatggcggtatgaggaccttgtgaggattttctttaaatacggagaagaaaaattcagcaagcagatcgcccgaaaaattgaagaggcaagagaaaaatcgcctattcaaacaaccggccaactggtcgatctaataaaggacgcgataccggctccggcaagaagaagcggaggtcatccggccaaacgtgtattccaagccattcgaatcgccgtaaacgacgagcttcaagtatttgaagaggccctcttgcaagcgatagaggtgctgaagccgggcggaagggtgtctgtgatcacttttcactcgctggaagacagaatgtgcaagacgacattcaaggaaaaatcatcacttcccgaactgcctccgggtcttcctgtgataccggaagaatttgaaccggaattaaaactgattacaagaaagcccattacggcatcaaaagaggagcttgaagaaaataaccgcgcccggtcagcgaagctccgcattgcggagaaacgaaaataacgggcagcaaatgacaacattaaaggaggtcatcagcctatgagcaacttagcttaccagcaggaaaaacaacaacggccagtgataagtcccgaaaaaaaggtgattgtcaaaaagagggcttccattacactcggggaaaaggtgctgctcgtcctgtttgccattgccgttctctccacatcaatgtttatcgtatcaaaggcatacgcggcgtaccaatccaatattgaggtgcaacaactggaggagaaagtatctgagaagaataagcagatcggtgatctcgaaaagacggctgctgacttaagccagccgcagcgcctgatggatatcgctaaaaagcacggtttgaatctgaaagataaaaaagtgaaaaacatacaggaatgataacccatgccgaaaaaaaataagtttatgaacagaggagcagcgatactcagtatttgtttcgctctctttttctttgtcattctcgggagaatggcgtacattcaattaactggtaaagcaaacggtgtagaacttgcaacaaaagcgaccgagcagcacgaaaaaaagcggacgatagaagcgagccgcggctctattcttgaccggaacggcaaagtgcttgcagaggacacggcgacatataagctcattgccgtgcttgataaaaaaatgacaagtgatccgaagcatcctcagcatgtcaaagacaaagagaaaacggcggaaaaactggcgaccgttatcaatcttgataaaagcgagattctggacatcttaaacagggatggcgcgaagcaggtggaattcggttcagccggccgcgatatctcttatgcgaaaaaacaaaagatcgaaaaaatgaatcttccgggtatttctttcttaagagatacgaagcgctactatccgaacggcgtatttttgtcaaatgttctcgggtatgccgatgtgaatgaaaaaacaaacgagatacaaggctctttagggcttgaaaaaatactgaacaactatctgacggaacgcgacggatccgtcacttacgaaagtgataaatccggctggaaacttccgaacagcaaagaaaaaatcaccgcacctaaaaacggtgacaatgtatatttaaccattgatcagaaaattcaaacctttttagaagacagcatgacgaaagtagcggaaaaatataaaccgaaaaaaattatggcggctgtcgtagaaccgaaaacaggcaaagtgcttgcgatggggcagcgtccgagttttgacccgaatatcagaaacgtcaccaattattacaacgacttagtgtcgtacgcgtatgaaccgggttcaacgatgaagatctttacgcttgccgcggcgattcaggaaaatgtgttttctgcaaacgagaaatataaatcaggaacatataaagtgggaggcaaacctgttaaagattggaacgatggcgccggttggggtatgacaagcttccatgacggcctcatgaggtcatcgaatgttgctttcgccaaactggccaacgaaaaactggggtttgaccggtttaatgagtacctgcacaaattcgggctctatcaaaaaacagggattgatctgcccggtgaagtatcaagtaaaattaactacaaatatgattttgacaaagcgtctacggcttacggccaagcatcggcgataacgccgatccagcagcttcaggccgtcacggcgattgccaataacggcaaaatgatgaaaccttacgtcattgatcatattgtcgaccccgatacgaaaaaagtcgtcaagcagacaaaaccagagcaggcaggcacgccgatttcagccgatacggctaaaaaagtccggaatctgctcggagaagtcgtgacgtcagacatcggaaccggaaaaccttataaaattgaaggatttgacgtcgcgggtaaaacgggaaccgcacaaattgccgggacgggcggatatttaagaggaacgagcaactatgtgttttcattcatgggcatggcgccgaaaaatgatcctaagcttgtcatctatgtagccgtgcagcagccgcaattaaaagcggggcaaagcagctctgatcctgtcgcggaaatctttaacccgacgatgaaaaacagcctccactacatgaatatcgaaccgacggaaaaaacagattccggtcaggaagaaacgaaaagccaaaagatgcctgacctgacagataagacggtcaagagcgctgagaaggaagcgaaaaatgaacatctcacaccgattgtcatcggcagcgatgttgccgtaaaagagcagtatccgacagccggagaagatgtgatcaccaatcagaaaatcttcttaaaaacagacggaaagatgacgatgccggatatgtccggatggtcgaggcgggaagtgcttcaattcagcaaagtatcaggcattcacattgatgtgagcggtgaaggttacgcttcaagccaaagtgtgaaaaaaggcaaagaactgaaaggaaataccgtgatcaaggtgaaatttaaaaatcctgattaacgggacagagaagtccgcggatgcccgcgggcttcttttttatgcgccgccgttctatgtgtccaagctgaggcataaattgaaacaagcctaaataaggagtggacggtcccttgcgcgtttcaaatgtaacggttcgaaaacgtttattactggttttgctttttggcgtaatcatttttttgatcattgacagcagattaggctatgtccaatttgtgatgggagaaaagctgacttcactggctaaggattcctggagccggaatttgccgtttgagcctgagcggggagagattcttgaccgaaacggcgtgaagctggctactaataaaagcgcgccgaccgtctttgtcgtaccgcgccagatccaaaatcccataaaaacgggcaaacttctcgcgtcagttttaaatatgtcggaagagaaggtctacaaacacattactaagaaaacctccatagaaaaaatctcacccgaggggcggaaaatttccaataaaaaagcgaaagaaatcaaagcgctcgacttaaaaggggtgtatgtggctgaagacagcatccgccattatccgtacggaagctttttgtcccatgttctcggttttgccggtattgataaccagggtcttctcggtttggaggcttattatgatgatgacttaaaaggtgtaaagggatccgtgaaattttatacggatgccaaggggaagaaaatgcctgatgaagcggatgattacacccctccgaaagacggacttgatatgaaactgacgattgacgccaaggttcagacgattatagaaagagagctcgacaatgcagcggcgaaatataacccggacggaatgattgcggtcgcaatgaatccgaaaaacggggaagtgctcggcatgtcaagccgtcctgattttgatccggctgactatcaatcggtggatccgtccgtttacaaccggaacctgccggtatggagcacatatgaaccgggttcgacctttaagattattacgcttgcggcggctcttcaagagcaaaaagtaaacttgcaaagagaccacttttatgacaaaggatttgccgaggtcgacggcgcccgcctccgatgctggaaaaagggcggccacggttcgcaatcttatcttgaagtcgttcaaaattcctgcaaccccgggtttgtacagctgggggaacggctcggaaaacaaaagctgtttcaatatattaaggacttcggttttggaaagaaaacaggcattgatctgcaaggggaaggaacggggatcttattcccgcttgacagagtcggcccggtcgaacaggcgacaaccgctttcggacaaggggtttccgtcacgccgattcagcaggtggcagccgtttccgcagcaataaacggcggaacgctttatactccgtttattgccaaagagtgggttgatcccgttacgaaaaaaaccgttaagaaacaatcgccgattgcgaaaaggcaagttatttcccaggaaacgtcaaagcagatcagatatgctttagaaagcgtcgtcgctcagggaacggggcggaatgcctttgtggaaggatatcgcgtcggcggaaaaacaggtaccgcacaaaaggtgaaagacggcaaatatctcgaaaacaaccatatcgtctcctttatcggttttgcgccggccgatgacccgagccttgtcgtgtatgtcgcggttgataatccgaaaggcacgattcaattcgggggaaccgtcgccgcgccgattgtcggaaatatgatgagagacagtctgcctgagctcggcgtgaaaccgcgaaaaaatcaaatcgagaaaaaatatcaatggaacgacacaaaaacaatagaggttccgaatgttgtagggatgtctgtctctgatcttgagtcgctgcttgtcaatttgaatattgactcctcaggaaaaggaagcaaaattgtgaaacaatcacctgcagccggaacgaaagtaaaagaaggctcaaagatccgtgtttacttgagtgaagaatgagtctttttgaggcagccgattgttttcggctgcctcttatcataaagagaaaaaaagaagataacttttaagattaactggatgtatccttttatttacgctaaaatatgaactgtatgtttaaaagccattctgacttttataaacggttatcatgataaaagaatgaatagaatttctgagaggtttgatacaatgaaacttacaaagctgcttacatatttaatggccgaacctgttcaaaatgactttcatgaccctgacataacttcaattgagatggactccagggaagtgagaaaagggagtctttttgtgtgtataaaagggtatacggtagacggacatgattttgcccaaaaagccgcagaaaacggcgcagcggccatcgttgccgagaaagagcttgacgtcgatgttcctgtcattattgtccgccggtcacagcgggcgctcagcgttctttctgacgcgttttacgggcagccgacaaagcagcttcagcttatcggcatcaccggcacaaacggcaaaacatcaacgacgcacatggttgatgagattttcaaaaaagcgggaagacagaccggtttaatcggaacgatgtacattaaaatcggggatgagacattcccggtcaaaaatacaacgcccgaaagcgtcacactgcaaaaaacgttcaagaaaatgaatgatgagcatgttgacacagctattatggaagtgtcttctcacgctctgtcactcggcagggttcacggctgcgattatgatatcgccgtattcacgaacctgacgcaggaccatttagattatcacaagacgatggaagactacagacaggctaaaagcctcctgttttcccagctgggcggctcctttaatcacgaaaagccgaagcgggccgttttaaacgcagatgacaaagccagtgcttattttgaaaaagtgacggcggcgcacatccttacatacggaatcgagaatgatgccgatgtcatggcgaaacaaatcgagatctctgcgcaaggcacaagctttgaacttgttacgccaaaaggaacaaagcagatcacagtttcactcgtcggccgcttcaacgtgtataacgtactggctgcagcggcgacagcgatcgcagcgggtctgccgtttgatacgatcacaagcgctcttgaagagctgcaaggtgtcagaggccggtttgaactggtgaatcataatcagccgtttcctgtggttgtcgattacgcgcacacgcctgacagtctggaaaacgtcctgaatacatgcaaagacatgacagagggcaagcttttcgtcgtcgtcggctgcggcggtgaccgggacaaaacgaaacgcccgaaaatggcggaaattgcggtgcggattgccgacgaaccgattttcacttcagataacccgagaagcgaggacccgctggccatattaagagatatggaaagaggggtagaaggcacttactatcacagtatcgcaaatcgcgagcaggctatcttttttgccattgccaacgcgaaaaagggagatgtggttctgattgccgggaaagggcatgaaacctatcagcaaatcggcaatgaaacattcgactttgatgacgccgaagtagcgggaagagctattgttgagctgaataaaaagtaaaacaggaaagagtgttagaatgagggaaatgaaaagaattacggggacacaatgtgaatatgataaatacgtatgtcgtttgaacgaaacgggaggagaaaagagcaatgcttgagcaagtgattttatttacaataataatgggatttttaatcagtgttctgatatctccgattcttatcccgtttttaagacgtttaaaattcggccaaagtatcagggaagaggggccgaaatcacatatgaaaaaatcagggacgccgacgatgggcggggtcatgattattgtatccatcgccattacggcgattgtcatgacgcagaaattttcgcatctgagcgcggaaatgtttcttctgctgtttgtcacgatcggatacggcctgctcggctttctggatgactatattaaagtagtaatgaaacggaatctcggattgacgtcgaagcagaaattgatcggccagatcattattgccatagtattttacggagtatatcattattgccatttttcaaccggcatcagggtgccgggcacacatctgtcaatcgatctcggctggggatactttatcctcgttctctttatgcttgtcggaggttcaaatgccgtcaacctgacagacggtctggacggtctcttgtccggtaccgcggctatcgcattcggcgctttcgccatccttgcgtggaaccagtcacaatatgacgttgcgattttctcggttgccgttgtcggcgccgttcttggttttcttgtattcaacgcccatcccgccaaggtatttatgggggataccggttcgcttgcgctcggaggagcgatcgtgaccgttgccattctgacgaagcttgaaattctgctcgtcattatcggcggagtatttgttattgagaccttatctgttatcttacaagtcatcagctttaaaacgacaggaaaacgaatctttaagatgagtccgcttcaccaccattacgaattggtcggatggtctgaatggagagttgtcgtcacattctggactgcgggactgctgcttgccgttttaggaatttacatcgaggtgtggttataagtggaaaacgaactttttttgcaaaaacaaaactttctggtcctcggactggcgaaaagcggatatgcggctgcgtcgattcttcatgaaaaaggcattaacgtcgtcgtgaatgatcaaaaagcctttgaagagaacgaacctgcccaaaggcttgcagaaagaggaattgaagtcatctgcggtgagcatccgacgtcactttttgatcagcatcacattaccattctgatcaaaaatcccggaatcccgtatgaaaatatcatggtggaggaagcacaaagaagaggcatcccggtctggacggaaatcgagcttgcgtattatatcaccaatgcaaaattcatcggcattacaggttcaaacgggaaaacaacaacgacgaccctgatttatgaaatgctgaaagctgattcgataaagacgctgatcgcagggaatatcggcactgtcgccagtgaagtggcttatcatgctgacggtgatgaatggatcgtcacagagctttcttcgttccagctgatggggactcatgcattcagacctgaaatcggcctgattttaaatgtgttcgacgctcatttggattaccatcacagccgtgaaaactatgaaaaagccaagcagaacgtgtatcttcatcagcttgagagtgatacggccatcgtgaatcagagcgatgaaacagtcgtgcggcttgccgaaagcggaaaagccggcaccgttccgttttcagttcaccaggaactgtcaagcggcgcattcattaaagacggaatgctgatgttcggcgatgaagcgattctgcctgttgatgacatcgtactgccgggcgcgcacaatttagaaaatattttagccgctgtagccgcggcaaaaacggcgggcgcgtctaataaagcgattcagaaggtgctgacaagctttaccggtgtcaaacaccgtctgcagtatgtaactgcgatccagaatcgtagattttataatgacagcaaagcgacgaatattttggccacaagcaaagcgctctccgcgttcaaagcaccggttattctgcttgcaggcggactggaccgcggcaacggttttgacgacctgaaaccgtatatggacaatgtcaaagcggtcctgacgttcggacagacagcgccgaagatagaaaaactgggcaatgagctgggaatacaacatgtcaaacgtgtcgataatgttgaacaagcagtatctgcggcgtttgcgctctcaaatgaaggagacgtcatcctcttgtcacccgcgtgtgcaagctgggatcaattcaaaacatttgaagaacgcggtgacatgtttatagatgccgtgcatatgcttaagtaagggcttgtctctgttcatcggcagccctaaatgacttatgcttggggtgtcgattgctttgactactaaaaaaacagcgcctgatttgttattagttatcattacgttattgcttttaacaataggattaattatggtctacagtgcaagtgcggtatgggcggattataaatttgacgactcgtttttcttcgcgaaacggcagctgctgtttgcggggatcggcgtcattgccatgtttttcattatgaatgtggattattggacatggcgcacatggtcgaagctgcttctgatcatttgtttttttctgcttgtgcttgtgctgattccgggagtcggaatggtgcggaacggttcaagaagctggatcggagtgggagcgttcagcattcagccttcggagtttatgaaactggcgatgattgcgtttctggctaaatttctttctgaaaaacagaagaatattacgtcattcagacgcggattcgttcccgcgctcggaatcgtgttttctgcatttattattattatgtgccagccagacctgggaacggggacggtaatggtgggcacgtgcatcgtgatgatttttgtttccggtgcgcgaatcgctcattttgcgttcctcggactcatcggtttaagcggatttgcggcgctagttctgtccgctccttatcggattaaacggattacctcttacttaaacccgtgggaggatccgcttggaagtggatttcagatcattcagtcgctctatgccgtaggtccgggcggactgttcgggatggggctcggccaaagccggcaaaagtttttttacctgccggagccgcaaaccgatttcatttttgctattttatctgaggaactcggctttatcggcggttcgctcatattgctgctgttcactattttattatggcggggcgtcagaattgccctcggcgcgccggatttatacggaagctttgtcgccatcggtattatttctatgatagctattcaagtcatgattaatatcggcgttgtgacggggctgatcccggtaacaggaattacgctgccgtttttaagctacggaggctcatcactgacgctgatgctcgcagcggtcggcgtgcttttaaatgtcagccggtactcgaggtattgatctgtatcttgcctcatcactcatgatttattcgttatctataaaaaaacagacaacatcaataaccctgtcctaaaaaacagggttatcgctatgtgattaagggggacatacgaatgcgtattgcagtaagcggaggcggaaccggaggacatatttatccggccctggcctttattaaagaagttcagcgccggcatccggatgtggaatttttgtatatcggaacagagaacggtcttgagaaaaaaattgttgaacgggaaaatattccgttccgcgccattgaaattacaggtttcaaacgaaaactttcttttgaaaatgtaaaaaccgtcatgcgcttcttaaaaggcgtgaagaaaagcaaatcatatttaaaagagtttaaaccagatgccgttatcggtacaggcggctatgtatgcggtccggtcgtatacgcggcggcaaaaatgggaattccgacgatcattcatgagcaaaacagcctgcccggcatcacaaataagtttctctcgaaatatgttaataaggtagcaatttgctttgaagaggcaaaatcgcattttcctgctgaaaaagttgtgtttacgggaaacccgagagcctctgaagtcgtctcaattaagacaggccgctcattaactgagttcgggctgaaagacaatcaaaaaacggtgctcattttcggcggaagcagaggcgcggctcccattaaccgtgccgttatagatatgcaggaagaattgaaaacgagaccttaccaagtgctttatattaccggggaagtacattacgagaaggtaacggctgagctgaaaggcggaaaagccgctgataatatggtgacaaaaccgtttttgcaccaaatgccggagtacttacaatcaattgatgtcattgtggccagagccggagcgacgacgattgcggagatcaccgctctcggcattccgagcgtgcttattccgagcccgtatgtgacagccaatcaccaggaagtcaatgcgaaggcgctcagccagcatgacgctgcaatcgtactgaaggaaaccgagctcagcggagaaaaactgatcgctgcgctggacaaaatcgtcatgaatgaagaaaccttaaaagacatgagtgagcggacaaaatcactcggtgttccggatgcggcagccagactgtacagtatcatggaagacataaaaaaatagagcaaatggaatgcggaggtttatgatggagaacgtaattcaggaattaagagaccgcgaagtcggcaaagtgctggaacaagaaccgctcgcgaaccatacaacgatgaaaatcggcggtccggcggacattttgatcatccccaaccgtgtggaagcggtcaaagatatcatggatattgtgaagaaacatgatctgccatggacggttatcggccgcggttcaaatctgctcgtgcttgatgaaggcataagaggagttgtcatcaaactgggcgcgggtctggatcatttggagattgacggtgatcaggtgacggtcggaggcggctattcggtcgtccggcttgcgacttccatgagtaaaaaaggaatgtccggtctcgaatttgcagcgggcattcccggatcaatcggcggagccgtctatatgaatgccggggcgcacggatctgatatgagtgagattcttgtgaaagcccgtatcttatttgaagacggcacaatcgaatggctgacgaacgaagagatggatttcagctacagaacgtctgttttgcagaaaaaacgtcccggcgtctgtctcgaggcagttcttcagcttgagcaaaaggaacgggaagccattacggcgcaaatgcagcagaacaaagattacagaaaaaacactcagccgtattcaagcccatgcgccgggagcatattcagaaatccgctgccggatcatgccggaaacctcgttgaaaaagcgggattaaaaggacatcagatcggcggagcgaaagtgtccgaaatgcacgggaattttatcgtcaatgccggcggagcgactgccaaggacgttctcgacctgattgaatatgtgaaaaagacaatccgtgagcagtatgatgttgacatgcatacagaagttgaaatcatcggagggaatcgttaaaaggttctctgattacatgagctcatgtgatatacttttaacaaatgtcaaacggcatcacagcatgccgtttgtttttcaatcagacgaatgtcaagctgtttcattcttagtgaggtggacaggcagtgaacccaaatcatgaaagagaaaaaattgtaaatattgaagagcggattccgaaaatcaaagagcagcggaaacaaaaagcaaaccgccggctgatttcattcattgtgctcttttttatgatggtgctgatcatcgtgtacttgcagatgccgatcagcaaagtgtcttctgtcaccgtttccggaaacgaaaacgtgtctgtaaaagagatcaacgcgctttctgatatacataacggacaaaccgagttctggagtctgaacaagaaacaaacagaagaaaagattgagcagaataagctggtgaaaaaggcggaactttcaaaagtatttcctaacaaagtcagcattcacattgaagaatacaagacgatcgcgtatctgcagcgacatgatgtatattatgaagtgctcgaaaacggcactgtgctgccgaacgaagtcacgccggatgacgcgggcccgattttggttgactggacaaacgcgaaaaagcgggtcaaaatggcggagcagcttgataagctttccggttcgctaaagcagtcgatttctgaaatctattatacaccggtaaaaatggatcaggaccggatcaagctgtatatgaacgacgggtatgtagttaccgcttctattaaaacgtttgccggccggatgaagacctatccttctatcgtttcccagctggacggcgggaaaaaggggattatccacttagaagtcgctacgtattttgaagaatttaacaaaggtaaatccggcaagaaaaaagaaaatgattaatagttctaaagaactaatttcaaggtggttcaaaagaatctattacaatcagcggggcagccgatataaccgatagcggaatcattatgactatgtttgtttttgcccgggatatggctgccggacaagcggaaaattctcaatgcaatgggcgtgtcttctgcaatgagcattgcatttggaattttcctcctgtttcttcttttttcggatgtttctggcaatatctatagcttttctggaggttcatcttagtgtagactaatggaaagcgggtatatttgcatctggtttgcacagtatggcaccgtgacaggaaatcttacggtaaggtgggccgtctctaaaaaaaataaaaaaaatacgatataaaagaggatatacatagaatataacgaatagtttcattaaacataaattgtgagaaatcagataagaatttgttgatgctgttgtttttgttacacacttgtaaagccacattcattgtattgttgttccgcaaataatagaatagaatttgatcgaaatgtgaggaggtgccatagaatgaacaacaatgaactttacgtcagtcttgacatcggtacgtccaatacaaaagtgatcgtcggagaaatgacagatgattcccttaacattatcggagtgggaaatgtaccgtctgaagggttgaaaaaaggctcaatcgttgatatagatgaaaccgttcattctataagaaaagcgtttgaccaagctgaaagaatggtaggttttccgctgaaaaaagccattgtcggcgttaatggaaattatattcatattcaagatacgaacggcgttgtcgctgtttccagtgaaaacaaagaaattcacgttgaagacgtccgcagggtaatggaagcggcacaggtcgtgtcagttccgcatgagcagctgatcgtagacgtcgttccgaaacagtttatcgttgacggaagagacgaaattaccgatccgaaaaaaatgctcggcgtgcgcctggaagtagaaggcacgctgattaccggctccaaaacgatcttacataacttacttcgctgtgtggagagagcgggcgttgaaattactgatatttgcctgcagccgcttgcggccggttcggcggctttgtcaaaagacgaaaaaaacctcggagtcgccatgattgatatcggcggcggctcgacgacggtggcggtatttgaacaggggcacctgaaggagacagccgtcattccgctcggaggcgaaaacatcacgaaagatgtatcgatcggattgcgcacttccaccgaagaggctgaaagagtaaaaaaacaattcggacatgcattctacgatgaggcttcagaagatgaagtatttgaagtcaccgtcataggaacgaatcaaaagcaatcttttacacagcaggaaattgccaatattattgaagcaagagtggaagagattcttgagattgccgcagccgaaattgagcatatgggaattacagatctgcccggcggctttgtgctgaccggcggacaggccgcaatgcccggagtgctttcattggcacaggaagtgctgaggcacaatgtaagggtcgcaagcccgaattatatcggtgtaagagaccctcagtatatgacgggtgtcggcttgatacaatttgcctgccgaaatgccagaattcagggaagaaaaataggctttcatatgccggaagaagccgtgcaggaaatcgcggtctctcacgaagaagaacatcatcagcggccagaggcgcagcagcgtccaaaagcaaaacaaaaaacacaagccgaacacaacaaaccgagcaaaatgaaaaaactattaagcatgttttgggaatagattgatagtcattcggcagattaggaggatttagcatgttggatttcgaaacaaacatagacggcttagcatcaattaaagtaatcggagtaggaggcggcggtaataacgcggtcaaccgaatgattgaaaatgaagtgcagggtgtagagtacattgcggtaaacacggacgcgcaagctcttaacctgtcaaaagcggaagtgaaaatgcagatcggggaaaagctgacccgcggtctcggagcgggagcgaatccggaagtcggcaaaaaagccgctgaagaaagtaaggaacaaatcgaagaagcgctaaaaggcgctgacatggtgttcgttacagccggaatgggaggcggtaccggaacgggagccgcaccggttatcgcgcaaatcgcaaaggacttaggcgctttgactgtcggtgtcgtaacaagaccgtttacatttgaaggaagaaaacgtcagctgcaggctgcaggcggtatcacggcaatgaaagaagccgttgacacactgatcgttattccgaatgaccgcattcttgaaattgtcgataaaaacacaccgatgcttgaagcattccgtgaagctgataacgtgcttcgccaaggggtgcaaggtatctctgacctcatcgcgacgcctggtttaatcaacttggactttgccgatgtcaaaaccatcatgtccaacaaaggttcagcattgatgggtatcgggatcgctacgggcgaaagccgtgctgctgaagccgccaaaaaggcgatctccagtccgttactggaagcggcaatcgacggagcgcaaggtgttttgatgaacattacgggaggtacaaacctgagcctctacgaagtgcaggaagcagccgacatcgtcgcttctgcatccgacccagatgtcaacatgattttcggttcagttatcaatgaaaatctgaaagatgaaatcgtcgtcaccgttattgcgaccggttttatcgaacaggaaaaagatgactcaaaaccgcagcgaccgactttaaaccaaggattgaagtctcaaagtcaaaacgctgcgaaacgtgagccgaaacgagaagaaacacagcatcaaaacacggtgaaccgccatacatcacagccggcggatgatgccctcgacattcctacatttttaagaaaccgcaacaaacgcggctgatgtaaaaaaggacaagaccacatggttttgtcctttttcttttttgtgtacagtcttccttcctatccccataatctatacagtgaaaaaagcaactttatacctatgacgaattgattgttttttagtttcatacggctttctacagaatgcgacaatatctggatggaagattgtctacatttaacgtacagcatcgaaatgacaaacgattccaattatgaaggagggatacacattttatagggcgttaccaaataaggggggatacgattgaagaaaaaaacaagaaacagatggacaggctccgttttaagcgcgattgtcgtcagttccctgttgtttccgggtgcagccggagcgaacagcacaccgggggcagtttctttcaccaaagatctttcttcctctaagagcattcagcataagatttccgattcagtcaagaagcgttttgaaaaaaatgataaagtcacgtttcttatcaaatttaaagagaaagccaatacgaaaaaagcggtcaaagaagcagaaaaaaacgccaagtctcaatcgctttccgcagcaaaaaacgaatatcaaaagcggtcagccgtcgtttcttctttaaaactggcggctcatgatgcgcagcagaatctgaaaacatatttggaaaaacaaaaaaagaaaggcaaggctgatcacatccattcctattatattgttaacggaatggcagtcactgcttcgaaagaggtaatggaaaaagccgcctcatttcctgaagtagaaaaagttcttccgaatgaaaaacgtcagcttactcaacgacaatcaaaagctccttttcaaatgaagaaaaaacaaaaagagatcaaagcaaaggaaggcatcgaatggaatatcagccaaattgatgcgccgcaggcctgggcctcaggatacgacggaaccggcacggttgtcgcctccattgatacgggagttcagtgggatcatccggcgcttaaagaaaaataccggggttacgatcctgaaaatcccgcagcgccgaatcatgaaatgaactggtatgatgccgtgtcccataaagacgctccctacgatgatcttgaacacggcactcatgtaacagggaccatgacgggttcagaacctgacggctcaaatcaaatcggtgtggctccgggggcgaaatggatcgcagtaaaagcattttcagatgacggaggaaccgatgccgatattttggatgccggtgagtgggtgctcgcgcctaaagataaaaacggcacgccccatcccgagatggcgccggatgttgtcaataattcctgggcaggcggttcgggaatggacgagtggtaccgcgatatggtgaatgcgtggagagcggcagggatttttccggaattctctgcgggaaatgaagacttatttacaccgggaggaccgggttcaatcgcaaacccggccaattatcctgaagcatttgcgacaggtgcgactgacatcgacaagaaactcgctgatttctcacttcaaggcccctcaccgtatcatgaaacaaaaccggacatttcggctccgggagtgaatatccgttcttcgattcctggaggaacatacgaaggcggctgggacggaacttcaatggccgggccgcatgtggcggcgacggcggctttgttaaggcaggcgaacgcctctattacggtcgatgaaatggaagacgttttgacgcgcaccgcggaaaagctgacagattccgtttttccggaatcaccgaataacggttacggccacggtctcgttaacgcttttgatgccgtttctgccgtaacggacggaatcggaggcgtagaaggcaaggtctcttctgcgggcgaagatcacaatccgcccagctttcaccatgaaccggtctcagcggcttacaaaggggcaaaccttccgttaacggttacagcagaagacgatgtaagcgtaactgaagtcatcctttcctatcagtttgatgaaggaaagtggaaaacgacagctgccgttcaaaaaagcggtgatgaaaaaaagggaacataccaggcggagattccggatgtaacgggaagcaaggtaagttataaatggaccataaaagatttcggaggtcattctgtagaatctgatacgtaccgggctgacgtgaaaccgagcattacggcgggatacaaagaggattttgaatcacagccggcgggctggtccagttacgggacacatgaccaatgggaatggggtatcccgggttcagggcccggcaccgcattttccggagataaagtgtatgcgacgaatctgtccggcccttatgccgattcagccaacatgaatttggtgatgcctccgattcaagttccggaaacaggacggctgtttttgcaatttaaaagctggcacaagctcgaagaattttttgattacgggtatgtgttcgttcttccggaaggaaaatcacattgggagcaggcggccgtttacaatggtgactccgcaggatggaacgatgaagaggcagatttatctgcgtataaaggccaaaacataaagctcatgtttaatatgcagtcagacgaagtactcaatgaagacggatggtatatcgatgatgtccggctttcaagcagccctctcggcaaggcggctaaaaaaagtaaacacaatagacaaacacctcccggccacctgaagaaaaaagcagtcagtccgaaacaggccaaaccggcagtgaaatcacccggaaaaagagtaaaacgtgaaacaaacctcctgcctctcagagcgcaaatcagtgtcgccgagacggggaaatccgtatattccgaccctgcaagcggaagctacagcctgtcgcataaggcgggaagctatacgctgaaagccgaggcttacggatttaagtccgcttcgaaacaagtttctattcaatcagacaaaaccgcacaggcagactttacactggagcaaatgccgtccggcacgctaaaaggaaccatcaccaatcagtcaacaggcgaaccggtaaaaggggctgcgctttatgtggctgaggatgccgcaattgaaccggcggtgacaaacgataaaggggaatattcgcttaaggcgtacgaaggctcctacacaatcaaagtagcggcaaaaggcttttacaatagcgaattttccgttgacatcaaaggagatgctgaaaaaaacgtcaagcttaagccgtatatcggttatgaaggggaaattgcatatgataacggaacggaagaagccgcgctgtcatattttaaagccggcagcaaatctgccgttaagatgacgctcaaagacggaaaagaacacggtatgctgacgggaggcctttttaaattttggggcgccgactggcctgatccgggcggtaccgaatttcaagcagaagtatatgatgcatccggccctgatggagctccgggcagcaaaattgccggcccgttccaagctgaagcgcttcgaaacggcgaatggaccaaagtggatctcagctcaaaaggaatcgcggtcggaaaggatttttatcttgtgttccgccagacgaaacccgatccttatacacctgccctgtcatctgatgacggcagtccgtactcgaacagaaactggcaataccttgacggccgctggtcaaaagccgataaatcagacggaaactttatgatcagggctttggtcgactacgaagcttctgtgccagaaataacgtcgcctgaagaccggtcatttacaaacaagaagtcaatcacggtgaaaggaacagcttcaccaaaaaccgctgtccgtcttaccaataacggtaaaaccgccgcagaaacgaaagcagatgcagacggcaatttccaggccggcgtcacactcactgaagatgccaatcggctgacggcggcatctgtgacagacagcgggtcaaccgatgagtcacgccctgtcacggtcatactggatgaggataagccggatgtgacgattgacagtccggcaaacggtgataaaacaaataaagaagcagtgaccgtaaaaggaaaagtgcacgacacccatttaaaatgggtaaaggtgaacggaaaaaaagctgaagtaaataacggttcttatcaagcgagaactcttctggaaaacggcagcaatgagatcaaggtcacggcctcagatgaagcgggtaacaaaacaacgaaaaagacggtaatcgatgtcaattacaatgctcccgtcatttccggattggttcccggagcggataaggaattaaaagccggagaatcagtgaaaatcgctttttcaagcggaaagaaattagacgcttccttcgttatccgtctgcctctgacaaacgcccgggcagggagccaaaacgcaacagagcttccgctgagagaaatttctccgggacgatatgagggttactggacggcgacttcttccatcaaagcaagcggagcaaaaattgacgttatcgctagagatgactacggaaatgaaacgagacagacggctaaaggaaaactttatatcaatgagtaaaacagagcgctgccagatcacggcagcgcttttttagttgaagcggacaataggaaagcaaccctttcggccctcgacaaataaaacggttatcccttaaaaattgtactttaccctcaacattaattgacagactttcccacagagcttgctttatacttatgaaacaagagagagatacagataagtaagacaaaagaggaaaggggtcagatgtgaaaatctatctggatgtcatttggctgttgaacttttgttttgattctcttttgcttttattgaccgcctttattttaaaacgccaggtgaaaaaaagaagagtggccgccggcggtttcatcgggtcagccattgtgcttctgatgtttacgcctgtttctccctttgtggagcatccggcgggaaaaatggcgttttcagtagtcatcgtgcttgcggcttttggctttaaacggttccgatacttttttcaaaatttgttcgccttttatttcgcgacttttctcgtcggcgggggaatgatcggcgtacattccctgctgcagacagaatcaattgtgcagcaaggcgtaatggtcacaagccagaccggattcggcgacccgatcagctggatgtttgtagttatcggatttccggccatatggtttttttcgaaaaagagaattgaagacatcgagacgaagtccattcagtacgatgaacttgtcatggtgcaggcggaattcagcggacagacaatccgcgcgaaaggattggtggattccgggaatcagctgtatgatccgctgacgaaaacgccggtcatgatccttcacattgacaaattcgctccgattctcagcgaaaaggaaacggccctcatcaaatccgccagtccgcttgaagtgatagagcagcttgatgattcgttccgccatgcggataagctgaggctgattccgtacaggggcgtcggccaggacaatcaatttttactctgtttaaagccggattacgtcacgattttaacaaaagacgaaatgatcgcttgtgaaaaatgcctgatcggcatcagcacgaaaccattatccgcggacggtgaatttgacggaatcgttcatccgaagatgctgacagggaaggctgtaaaacatgtttcctgacgaaaagtctgttattcatcatactcaaaacgcgttgtatttagaagggggaggaagatgaaaaaacttaagctgcgtctgacatatttgtggtataaatggctgatgaaactcggactgaaaagcgatgaagtgtattacataggaggaagcgaggcgctgccgccgcctttgtctaaagaagaggagcaggtgctcttattaaagctgccgagcggggatcaggcggcgcgggccattctgattgagagaaacttacgtcttgtcgtttacattgcccgcaaattcgaaaataccggcatcaacatcgaggacttaatcagcatcggcaccatcggtttgatcaaagcggtaaacacttttaatccggaaaagaaaatcaaactcgccacctacgcgtcgcgatgtatcgaaaacgaaattttaatgtacttgcgccgaaacaataaaatccgttcagaggtgtcctttgatgaaccgctgaatattgattgggacggaaacgagctgctgctttcggatgtgctcggcacagacgatgatattattacaaaagacattgaagccaatgtggataaaaaacttttgaaaaaagcgcttgagcaattaaacgaaagagaaaagcagattatggaactgcgtttcgggcttgtcggagaagaagaaaaaactcaaaaagatgtagccgacatgatggggatttcacaatcttatatctcccggctcgaaaagcggattatcaaaagactgagaaaagagtttaacaaaatggtgtaaaattttttccaactgacagcccttactgctgcaaggattgccgcagccggatgtttatttctgtaaaatggcggtgcatatttttcccacccgaggagatacttaacgttgtacagcagctcctagtgggagggaaaaacgtgtcaagaaataaagtcgaaatttgcggggtggatacctccaaattaccggtgctcaagaatgaagagatgagaaagctgtttaggcaattacaggatgagggcgatgattcagcgagggaaaagcttgtaaacggcaatctgcgccttgtcttaagcgtcattcagaggtttaacaacagaggagagtatgttgatgacttatttcaggtcggctgcatcggactaatgaaatccattgataattttgacctaagccataatgttaagttttcaacatacgctgtaccgatgatcatcggagaaatccgcagatatttgcgggataacaatccgatccgcgtctcgaggtcgcttcgcgatatcgcatataaagcgcttcaagtaagagagcggttaatcagtgagacaagcagggagccgacagcagaggaaatcgccaaagttcttgaagtgccccatgaagaaattgtgtttgcccttgacgccatccaggatccggtttcactgtttgagccgatttataatgacggcggcgatccgatttacgtgatggaccagatcagcgatgagcgcaataaggatacacaatggattgaggagctcgctctgaaagaaggcatgagaagactgaacgaacgggaaaaaatgattttgcgaaagcgctttttccaagggaaaacccaaatggaagtcgctgaagaaatcggcatatcccaagctcaggtctcaaggcttgaaaaagcagccattaaacaaatgaataagaatatccatcaataacggaaaaagcctttaaaccttgtttaaaggcttttttcatgcgatggtttacgtttgcaaaaaagtgatgtattctaatgtgtaaaagtttttagaaaatttaaacaaagtaaacgggggaaactgcaatgattttacagctggacagtgtgtcattaaaaagaaacgggaaatggattttgaaagatatcaactggcgcgtcgagaaaaacgaaaattgggtgctgtacggattaaacggagccggaaaaacggctttgctgaatatgttatgctcttattacttccccacttcaggagagatgcaggtgctcggccatcaattcggcaaaacagagctcggtgacaggctcagaaggaaaatcggtcttgtttcggcaggtcttcagcacaaattatatgccgcggactccgcttttgaaatcgccctcagcggcgcgtacgcctcaatcgggctgtacgcaactccgagtgagcaggtaagggaaaaagcgatcggacttctgaaggatttgggcgccatcggttacgccgacagacggtatgaaacattatcacaaggggaaagacaaagagcgctgattgcgcgggcgcttatggctgatccggaactgctgattctggacgaacccgtgacgggtcttgattttatggcaagggagcagctgctggacacgattacgtcgatcgccgaaaaagaaaatgcgccgtccatcctttatgtcacccatcacgctgaagaaattctgccggtatttgatcagacgctgcttttaaaacagggcgaggtgttcgcctccgggaaaatcagggacatgctttctgacgagcggcttacagcgtttttcgatatgcctgtcaatgtcttatggaacaatggccgcccgcttttaacacgtgcaaaagaggcatcatctgtaaaataacataaattcaccctgggggtgctgccatgcggctgagagagacgtttgtctcaacccttaacggacctgatccggatcatgccggcggagggaagcggtgaaaaaagcggaggaagatccgttttttacccgtttcatttcatgaatgaaacgggttttttgatacagccaaaggggagatttccaatgcatcagattgatatgctgttacaccaggcggagaaacggcggcacgacttcatacatattgctgaaagactgatagcttttcccactccggccccgccagcaagaaatacggcagaagcccaaaagtgggtggccggatttttaaaagaaacgggctgctcggtcgatatgtgggatgtgtatccggaagatccgaatgtagtcggtgttttaaaagggacagattcaagcaggcatcaaagcctgattttaaacggacacattgatgtggcagaagccgggggcgaagactggcactctgacccgtttcagccgcacgtaaaagatggcatgctgatcggaaggggtgccgctgatatgaaagggggtttggcgtgtgttcttttctctctgaagctgatccatgatgccggcattaagcttccgggcgacctcattgtacagtctgtaatcggagaagaagtcggtgaggcggggacgctggaatgctgcaaacgcggctatcacgcggattttgccgttgtcgcggatacgagcagcctgcatattcaagggcagggcggagtcatcaccggctggatagaattgaaaagcaaacaaacatttcatgacggcatgaggcgcaatatgattcatgcgggcggaggcacattcggagcgagcgccatcgaaaaaatggcgaaaatcatcactgccttgggagagctggagcgccactgggcggtaacgaaaagctatcccggttttgcgcccggcaccaatacgatcaaccccgccgtcattgaaggcggaagacacgcagcgtttgttgccgatgaatgccggttatggatcaccgtccacttttatccgaacgaaacgcacgaacaagcagccgcagaaatcgaagactatattaatcgtgtcgctgacagtgatctgtggctcaaagaaaacaggccggtgttcaaatggggcggatcttcgatgattgaagacagaggagaggtgttcccggcgctggaaatcgacccggatcatccggcagtttctgtcttggctgcatcacactcagccgtcagaaaacaggagcccgtcattgatgtttcccaaaccgtaactgacggagggtggctttatcatgccgggattccgagcgtcatatacggtcccggcgatttaaaaaacgcccactccgtaaacgaggaagtgtccgttgatgagcttatggactatacgaaaattatgctgagatttatcctcggctggtgcagccgcaaaaaagattgcccgatgtgacaaggttcagcccggccgttcatataataggaaaaagaacgggcaaagggcgtgatacggatgatcagcatatctgaatttcaaataaaagatgtggtaaacgtgtcgaacggaaaaaaactcggaagcatcggtgatattgatattaacgtgacaacgggaaaaattcaggcgattattttaggcggcagcggaaaagttctcggttttttcggaaaagaagaggaaatgatcattccttggcgaaatatagttaaaattggggaagatgtcatcttagtgcgtgtaaacgaaccaaaggggggagcgtaatcctccctttacttgtaaaaagccggaaatctcaatgtttccggcacatttatttatctcatttttcaatcagccgctaaacgtatgctcaaaattgtgttaaaatgagtgggaaattacgcttttttaatgtttgtcgaaaggttggatctccatgaatacatatcacccgtttagtcttaccaccccctcggcactcatgatagaagactggaactgtgtgaatcagcttaacacaaaggtcatcgccggattcacaacgaaaaacggcggggtcagcaatcctccgtatgagtcattaaataccggattgcacgtccgggacgaagctcatgatgttgtgacaaaccgtgaagtcatagcgtccttatgcggtactgatctggattcctgggtgttcgccgaccagacacatgaaaaccgcgtccggcgcgtgacagccggggataaaggaaaaggagcgagagactattcttccgcattccgcgggacggacgggctctacacgaaagatgcgaatctttttttggccctttgttttgcggactgtgtgcccttgtatttttatgacccggtgaaatccattatcggcgctgcccatgccggatggaaggggacggtcaaacaaatcggacgcatcatgacggaacgctgggtaaacgaagaaggctcccgtttaacagatattcaggctgtcatcggtccgtccatcagcgcgggaagctatacagtcgacgaccgcgtcatcaatgaagtgcgggcgctgccttttacggctgaatccgccatatgcgaaacggaaaaaggccagtatcagcttgatttaaaagaggtcaaccgtcttcttctgatacattgcggcattccggaagaaaacatttcagtcagcggtttatgcaccgaacgagagcgtgaactattcttttcacaccgccgcgacaaagggaaaacgggacgcatgatgtcctttatcggaatgaaggaggcgtaagatcttgcgtgttgctgatcaattacgacatataaacgaaagaataaacgaagcatgtaacagatcgggccgaagccccgaagatgttaccgtcatcgcggttacaaaatacgtatcagccgaaagggctcaagaggccgttgatgccggtattacaagtctgggagaaaaccgggatgccgagcttatccataagcaggaagtcatcaaaggcagcccggagtggcactttatcggcagtcttcagtccagaaaggtgaaggccgtcgttgaccgtgtatcttatattcattccttagacagactgtcattggcaaaagagattgaaaaacgggcgcagcatgcggttcgctgttttgtgcaggtgaatacttcgcttgagccgtctaagcacggtttgaaaacagaggaggtcatcccctttatcagagagctttctgagtttagaaacatttctgtagagggcctgatgacgatggctcccctgacagacgatacagaaacgatcagagcctgcttccggcaattgcgtgatctgagggatcaggtgcaaaaactgcatcagacaaacgcaccgtgccgggaactgtcaatgggcatgtcaaatgattatgaaatcgctgttgaagagggcgcaacttttatcagaatcggctcttcattagtcggaaatgaaccggggggtgtaaacaaatgagcatgaaaaataaactgaaaaactttttctcaatggatgaggaggagtacgagtacgaatacattgaaacggagcaggatcatccggaagagcatgaacagcagaaagataaacagcctgcttacgctcagaagccgcagggcaagcagaacgtagtaagcttgcaaagtgttcagaaatcctctaaagtggtgttgagtgaaccgcgtgtatatgcggaagcgcaggaaatcgccgatcatttaaagaacaggcgggcggttgtcgtcaatctgcagcgcatccagcatgatcaggcgaaaagaatcgtcgactttttaagcggtaccgtctacgccatcggcggcgacattcagagaatcggttcagatatttttctgtgcacgcctgataatgtcgacgtttccggcacgatttcggagcttataaatgaagacgaacatcagaggtggtaaagcaggatgattctttatcaaattttttccgttctgagttatttaatttacatctactcgtttgccctgatcatctatatctttatgtcatgggtgccgagtacgagagaaacggcggtcggacggtttctcgcagcgatttgcgaaccgtatttagagccgttcagaaggatcattccgcccattgccatgctggatatatccccgattgtagcgattatcgtgcttcggtttgccacgacgggactttggggcctataccgcatgatcgcaatgtatacttgaatgcgacagtttgatacgggcttggcaccagccaagcctctttacatagaaaggaaagaacatgagcgatatttaccagcacttcagacaagacgagcggccttttattgatcaggcgcttgaatggaaacagattgtcctggaccagtatcggatgaagctgactgatttcttagatcccagagaacaggtcattgtaaaagccgttatcggcgacgcctgcggtcttgcgtttttcggaggatatgacagagctgagcgcaagcgcgcgattttataccctgaatatatggaacctgaacaggatgattttgagcttcgggcttttgacgttcaatacgctgaaaaattcgtcagcattgaccaccgctctcttctcggatcattaatggggatcggcttaaagcggcagaaatacggcgatctgattttctctgaggaagccgtgcagctgatcgtctccggtgaaatcgccgattttgtcagcactcagctgaccaaggcgggcaaagcgccggtaaagcttgagaaaatcgagctttccgctcttcacattcccgcttcagatgtcgaaataagggatgacacggtttcttcattgcgtctcgacgccgtctgcgcttcaatgagcaggcaatccaggcagaaagcgcaggcgcttgtgaaaaacgggctcgttaaggtgaattggaaagccattgaagatccgtcttatcaggttgctgaaggggacatgctttcgattcgcggcttcggacgatgcagtttggcaaaagttgacggaaaaacgaaaaaagacaaatggaaagttacatttgaacggcaaaaatgagtcgttttttcagtttttttctccatctgtgccgtatttgttttataatgtgaactagataaccgtactgaaatgtaaaaatggaggtggcaatatgccattaacgccgaatgatatccataacaaaacgtttacaaaaggttttcgcggatatgatgaagatgaagtaaatgaatttttaatgcaggtcagaaaagattacgaaatcgcactccgtaaaaaaacggagcttgaggcgaaagtgaacgagctggacgaaaaaatcggccactttgccaatatcgaagaaacgctgaataaatcaattctcgtagctcaggaagccgcagaagacgtaaagcgcaactcgcagaaagaagcgaagctgatcgtccgtgaagcagaaaaaaatgctgatcgcatcatcaatgagtcgctttccaaatcaagaaaaatcgcaatggaaattgaagagctgaaaaaacagtctaaagtcttcagaacacgtttccaaatgctgattgaagcgcagctcgacctgctgaagaacgatgattgggatcatctgctggaatacgaagtcgacgcggtatttgaggaaaaagaataattttctgattttcttgacattctccggcccgttcgaatataatacgttcataaattcagatgaaaagacgattgaaagggaccggcatgactcaaaacaggctataaagcgacccggggaaggtgaaagcccgggatggccggaatcatgcagatcagccctttagtttcctttctgaaccgagagtaggaaaggacgttccatcacgttacgatgttcgagaggaaaagacggatgatccgttttttctaaaagggtggtaccgcgagataagctttctcgtcccttatgggatgagagggctttttttattttctgaaaaatgttgtggaggaatgaaaatggattacaaagatacgctgttaatgccgaaaacagattttccgatgcgcggaaatctgccgaatcgtgagccggacatgcaaaaagactgggaggagcaggacatttaccgtcttgttcaagaacggacgaaagaccgcccgaaattcgtgctgcatgacggacctccttatgcaaacggagacatccacatgggccatgccctgaacaaaatcctgaaagacttcatcgtccgctataaatcaatgagcggctacaacgcaccgtacgtgccgggctgggatacgcacggactgccgattgaaacggcgctgacgaaaaacaaaaaagtaaaccggaaagaaatgtcagtagcagaattccgcaaactatgtgaagagtacgcttggaagcaaatcgagggacagcgtgagcaattcaaacgtcttggtgtccgcggtgactgggaaaacccatacgtgacattaaaaccggaatacgaagcgcagcaaatccgcgtatttggtgaaatggcaaaacgaggctacatttacaaaggccttaaaccggttaactggtcaccttcaagtgagtctgctctggctgaagccgagatcgaatatcaagacaaacgttcagcatctatttacgtcgcttttggtgtaaaagacggaaaaggcgttcttgaaaacggcgagcgcatcatcatttggacaacaacgccttggacaattccggcgaacctcggaatctcagtgcaccctgatcttgagtacagcgtgattgcagtaggtgaagaccgctttgtcgtagcaagtgccttagtcgaaagtgttgcatcagcatgcggatttgatcagtatgaagtgacaagaacggtcaaaggaaaagaccttgagaacattatcgctgaacacccgctatatggcagagactctctcgttatgcttggtgaacacgtaacaactgatgccggaacaggctgtgttcatacagcgccaggacatggggaagatgactttatcattggccaaaaatacggtttagatgtgctttgcccggtcgatgaaaaaggtgtaatgacaagcgaagctcctgggtttgaaggcatgttctatgatgatgcaaacaaagcgatcacacagcagctcgatgaaaaaggcgcacttgtgaagcttgaattcattactcactcttatccgcatgattggagaacaaaaaaaccaaccattttcagagcgacagcgcaatggtttgcgtctattaaagatttcagatcagacctgctggatgccattaaagaaaccaaatgggttcctgaatggggtgagcagcgtttgcacaacatggttcgggaccgcggagactggtgtatttccagacagcgtgcgtggggtgtgccgattccggtattttacgctgaaaacggagaaccgattattacagatgaaaccattgaacatgtttctgaattgttcagacagcacggatcaaacatttggtttgaaaaagaagcaaaggatcttcttccggaaggctttacgcatcctggcagcccgaacggcacatttacaaaagaacaggatatcatggatgtttggtttgattcaggctcttcacatcaagcagtgcttgaagaacgtgatgacctcgttcgcccggctgatttatacctagagggatctgaccaatatcgcggctggtttaactcttctctttctacagcagtagccgtaacaggaaaagcgccgtataaaggtgtgctcagccatgggttcgcactggatggagaaggacgcaagatgagtaaatcaatcggtaacgttgttgttccggctaaagtcatgaaacagcttggtgccgacatcttaagattatgggtatcgtcagtggattatcaggcggacgttcgcgtgtctgacgccattctgaagcaggtcgcggaagtataccggaaagtccgcaacacgttccgcttccttcacggcaacctgttcgatttcaatccaagcgtcaatgccgtggatgtaaaagatctccgcgaagtggatcaatatatgctgatcaagctgaataagctgatcgataaggtgaaaaaagcgtacgatgaatatgaatttgcggttgtttatcacagcattcacaatttctgtacgatcgagctcagctccttctatcttgattttgcaaaagatgttgtgtacatcgagcatgcggatcatccggaccgccgcagcatgcagacggtcttctatgaaacgctgctggcgttagtgaagctgacggcgccgattctcccgcacacggcggatgaaatgtggtctcacttatcatttgttgaagaagcgagcgtgcagctgacagatatgccggaaaccattgctgttccggacagtcaagcgacagaagaaaagttcgaccgcttcatggagcttcgaaacgacgtgctgaaagctttggaaacagcccgtaacgaaaaaattatcggaagatcattggaagcgagcctgactttgtatccgaacaaagaaaaccgcgacctcttgtcatccattaaagaaaacatcgcgcagctgtttatcgtctcagaactgacagtaaaagacgaaagtgaagcgccggaaaacgcgcaaagcttcacaacaggaaaaatgaccgtagaaaaagcggaaggccagatgtgtgaacgttcccgcgtaatttctaaagatgtcggagccaatccgaaatatccgacgttatcactgcgcaatgcggaaatcgttgaaaaatattatcaaaaataataaatgagaaagcgcccggtgacagccgggcgctttttttacatgccactaatgtcatcgattagaacgacaggaaaaatcttatgggcttcaaatggcgctctgggggcaacaataaagctataacatcaagagcaggagttgtgatgaatgaatgatcaactgaccgcaatccacacggagcttctcatgatgaaagaagaacttcaatcaagattattcgaatattcttgctttcaaatgtcagcatctgttgaaccttcaatgaacgaccaagaagcaactctgatctatcatataaaagaagaacttcaggacgttcttcttgccctgtctaagtttgaaaacaatacgtacggttattgtgaaaaaacaggcgaccccattccgattgaaaaacttgcggtgctgccgacggccagaaccgctgatgatttttattatcccgctcaatttgaaaagaaaacccttccatattgggaacccggagattatgcatatgatcaggcgctgtatgagtgacagcgtctgtttgcatgcgcttatgatctgcctttactctggcatcttttactgataaaattcataaaggataaaagtaactgtatactggaggaacgtgtgtgctttattatctaatcgctctttttattattattgccgaccaattgaccaaatggcttgtcgtcagccatatggaattgggacaaagcatacctgtcatcgatcaggtgctttatatcacatctcatcgcaacacgggagcggcgtgggggattttagccggccaaatgtggtttttctacgtcattaccatcgccgtgattatcggaatcgtttattacatacagcgttatgcaaaagggcagatgttactcggaatttctctcggcttaatgctgggcggtgcggccggaaactttattgaccgggcggcgcgccaggaagtggtggattttattcatgtcatcatcgtggattatcactatccgatttttaatatcgcggactcctcactgtgcgtcggtgtaatacttttatttattcatatgctgtttgacagcgggaaaaagaaggagcaataacatgaatcaatttgagataaccgttcagcctgaacaaaagagcgaacggattgataaatttttggcttcaacgggagaaaactggtcacgcactcaagtgcagcaatgggtaaaagagggattggtatccgttaacggcaaatccgtaaaagcgaattataaaatgcagcccggcgatcaggtaaacgtcaccattcctgaaccggaagaattggacgtgcttgcagagccgatggatttggacatttactatgaggatcaggacgtcttggttgtgaacaaaccgcggggcatggttgtacacccggcgcccggccatgtgactgggacgcttgtaaacggactgatggctcactgcaacgacctttccggcattaacggcgtcatgcgcccgggaatcgtccaccggattgataaagatacttccggtctgttaatggtcgctaaaaacgatatggcgcatgaatcactcgttaatcagctcgtcaataaaaccgtgaccagaaagtacacagcggttgtccacggggtgatttcacatgatgacggaacgattgacgctccgatcgggagagataaaaaagaccgtcaaagcatgaccgtaacaagagaaagcagcaaaaacgccgtcacgcatttccacgtgcttgagcgttttcaagatttcacgctcgtagagtgccgtcttgagaccggaagaacgcatcagatccgtgttcatatgaaatatatcgggtttcctttggcaggcgacccgaagtacggaccgagaaaaaccattgatttcaatggtcaggcgcttcatgccggaatattaggttttgatcatccgcggacgggcgaatacatggagtttgaagcgccccttcctgaagatatgaaaaaactcattgaagatttaagaaatagccattgacagcgactttcttttctgaaataataaaaacaagctgaatagattctttaacacagtccagagaggctgagaaggataacggataggacagaagagatacacgtgtgtcttcgtcctggaaaggaacccctctatgctctggcaggaggggttttttcttcttatatacgaatggagaggtgtcacgagtgaatcaaaaagctgttattctcgacgaacaggcgatcaggcgggcgctgacaaggatagcccatgaaatgatcgaacggaataaaggaatgaatgactgcattcttgtagggattaaaacaagaggcatttatttagcgaagcggctggccgagcggatcgaacagattgaagggaatccggtcaccgtcggggaaatcgatatcaccctttaccgtgacgacctgacgaaaaaaacgagcaatgaagagccgcttgtaaaaggcgcggacattccggccgatattacagaccaaaaggtcattgtggttgatgatgtgctttataccggccggacggtgagagctgcgatggatgccctcgttgatgtcggacggccgtcatcgatacagcttgccgtgcttgtcgacagagggcaccgggagctgccgatcagagcggactatatcggaaaaaacattccgacctcaaaagctgaaaaagtgatggttcagctgagcgaagttgatcagactgatatggtcgccatttacgaaaatgaataatcacctttttaaatgcattccagagagtttgcaaagaggattttaaaacacaaagccgggcggatcgacgcggccgggttttgtatgcctctttgcgcaaaaagcaaagaggtttttttataccatttgaaagtcaaccgggaggaaaacgccatgagtaagaaaaaagtaaacctgggagtcagggacgtccccaatccattgtcctggctgtcattcagcctgcagcatttattcgccatgttcggttcaaccatactcgtgccgaaactggtcggaatgagcccggcagtggcgcttgtcacgagcggaatcgggacactcgcctatctcttggtgacaaaaggccagattcccgcttatctcggctcatcattcgcctttatatcaccgattatcttggtgaaggcgacgggagggccgggggctgccatggtcggcgctttcctggcgggaattgtgtacggcctgatcgcgctgctcatcaggcagcttggaacggggtggctgatgaagctgctgcccccggtggtcgtcgggccggtcatcatcgtcatcggcctcggactggcaagcacagccgtcaatatggcaatgtatgctgatccgaatgcgaaggaactcgtctacagcttgaaacatttcagtgtagccggcgtcactttggccatcaccattatctgcgccatctttttacggggatttttaagcctgattccggtattgatcggcattataggcggatatctgtttgcgctgacacagggcatcgtcaattttcagccggtcattgatgcaaagtggttcgccgttcctgaatttatcatccctttcaaagactatacgccgtcagtgacattgggcattgcggctgcgatggtgccggtcgctttcgtgacgatgtcagaacatatcggccaccaaatggtgctgagtaaagtcgtcggacaggatttcattaaaaagccgggactgcaccgctccataatgggggacagtgttgcgacgatcatcgcttcgttaatcggcggcccgccgacgacgacatacggcgagaacatcggagtactggcaattacgagagttttcagcgtctttgtcatcggcggcgcgggtgtgattgcgctgtgcttcggatttatcggaaaagtatcagcgctgatcagctctgttccgtccgcggttatgggcggcgtttccttcctgctcttcggaattatcgcctccagcggcttaagaatgctgattgacaacaacattgattatgagaacaagagaaatttgattatcacatccgtcatcctcgtgatcggcgtcggcggtgcgttcattcaagtatcaaaaggcgggttccaaatatccggcatggcgcttgcggcaatcgtcggagtcatcctgaaccttatcctgccgcatgcaaatgaagaagacgcgatggcatcagaaaaacaaaatcatatgtaaaaccttttaaagaaagtccagagaggcttggaagggttataacgggaagaagctgtacgctgcttctctctttaaccgcaccccgagtctatagaccggggtgtttttttacggccttcaagcggaaacggaggagaaaaacatgaatcatttaacggcgatgtctgaactgagcgcagctgaaattacagaactgctgcgtgaggcaaaagcgataaaagagggaacagtccgccccgatctcgcgggaaaatttgttgcgaatctgttttttgaaccgagcacgagaacgcggttcagctttgaagtggcggaaaagaaactcgggatgaacgtgctcagcttagacgatacgagcacaagcgttcaaaaaggcgagtccttatacgacacggtcaaaactctggaatcaatcggagcggacgcctgcgtcatcaggcacagcacggatgaatattacaaagatctgaccggcagagtcaatattccgatcttaaacgccggcgacggctgcggccagcacccgactcagtcattactcgatttaatgacgattcaagaggaatttgagacctttcagggcctgacggtttccattcatggcgatatcaaacacagcagggtggcaaggtcaaatgccgaggtgctgacaaggctcggcgcacgcgtgctgttttcagggccgccgcaatggcaggatgagaaaaacgccttcggcacctgtgtacagacggatgaagccatacaagcttcagatgtcgtcatgctgctccgcatccaaaatgaaaggcatcagacagaagccgaccaaaaaggctacctggaagcatacgggctgaccgcaaagcgggcggagagcatgaagcggcatgccatcatcatgcatcccgcaccggtgaacagaggagtcgaaattgacacaacattagtggaatgcggaaaatcaagaatctttaaacaaatggaaaatggtgtgtatatcagaatggcagtcttaaaaagagcactgcaaaccaatgtgaaaaggggagaagcggcttatgtcttatctcattaaaaacggctggatgttaaatgaacagggagaaaaagtggcacaggatatccgggtaacgggtgaattcatttcggaaaccgggcttctgacagcgaaagacggagaaacggtgatcgacgctgacggactgttcgtttcaccgggactcgtagaccttcatgttcacttcagagaaccgggcggcgagaaaaaagaaaccattgagacgggctctaaagccgcggcgcggggcggctttaccacagtcgcagccatgccgaatacaagaccggtgccggatacgaaagagcagatggaatggctgcaaaaccggatcaaagaaacctcatctgtcagggttcttccttacgcatccattacgatcagacaaaccggcgaagaaatgacagattttgaggcgcttcatgaagccggcgcattcgccttcaccgatgacggcgtcggcgttcagacggccggaatgatgtatgaagccatgaaacgggcggcttcaatgaataaagcgattgtcgctcattgtgaggataactcgcttatttacggagggagcgtgcatgaaggttctttttcaaaagcgaacggcctgaacggcataccttccatttgtgaagcggtacatatcgcccgtgacgtgctgctggcggaagcggcgggctgccattaccacgtgtgtcatatcagcacgaaagagtccgtcagagccgtaagagacgcaaaaaaagcgggaatccgcgtgacggcggaagtatcgccgcaccacctgctgctttgtgacgaagatatcccgggacttgataccaattttaagatgaatccgccgcttcgcagcaaagaggacagagaggcgctgattgaagggcttttagacggtacgattgatttcatcgccactgaccatgcgccgcatacagaagaagagaaaaacacggatatgaagcttgcgcctttcggtatcgtcggtttagaaacagcctttccgcttctgtacacacattttgtgaaaaacggggcgtggacgctgaagcagctggttgatttcatgacgtcaaaaccttgcgaggcatttgatcttccgtacggaacgcttgcaccgggggcgccggctgacatcaccctgattgatctggaaaaagaagcagccattgacaaagatacatttttatctaaaggaaaaaatacgccattcaacaagatgaagtgcttcggctggcctgttgcaacgatggctgccggtaagcttgcatacgaagaagggagactcgtcaaatgaaaagaagactagtgctggaaaatggagcggtatttgagggtgaagcattcgggagcctggagcataccgcgggtgaagtcgtattcaacacgggaatgaccggttatcaggaaattttatcagacccttcttactgcgggcagatcgtgacgctgacgtatcctctgatcggcaactacggaattaacagagatgactttgaatccatcactccttttgtaaaagggctgatcgtaaaagaactgtgcgagctgccttccaactggcgttcggcttacacgcttgacgagtatttgaaaatgaaaaatattcccggcttacaagggattgacacgagaaagctcacaagaatgatccgcacggccggcgcattaaaaggaacgtttgcttcaagtgaggagaatgtcggagaggttctggcaaggctgaaagaaacggaactgccgagaaatcaagtcgctcaagtatctgcgaaaacggcttatccgagtccgggccgcggcaaacgcatcgtactcgtcgatttcggtatgaagcacggcattttaagagagttaaacaaaagaaaatgcgatgtcatcgttgtgccgtacaatgtaacggcggaagaagtgcttcagctcaagccggacggcatcatgctttctaacggacccggagatccgaaagatgtgccggaagccattgaaatgataaaaggcatactcgggaaggtgccgttattcggaatctgcctcggccaccaattatttgcgctggcatccggagcggaaacggaaaaaatgaaattcggacacaggggttccaatcatccggttaaagagcttgcgacagggaaagtcgctttaaccgcccaaaaccacggatatacagtttcttcaatagatgagacagagcttgaagtgacgcacattgcgatcaatgatcaaacgatcgaaggactcaagcataaaacattgccggcatttacggttcagtaccaccctgaagcttcaccggggccggaagacgccaatcatttatttgacagattcattgacttgatcgaaacaactgagaaagaaggggaagcggtatgccaaaacgcgtagatattaaaaagattttagtgatcggatcaggcccgattattatcggacaggcggcggaatttgattatgcgggcacacaggcgtgtctcgctttaaaggaagaaggctatgaagttattctcgtcaactcgaatccggcaacgattatgacggatacggaaatggctgatcgggtatacatagaaccgctgacgccggagtttctcacgcgtattatcagaaaagaacggccggacgccatcctgccgactctgggaggacagaccggactgaatcttgccgtcgagctgtctgaactcggggttcttgaggaatgcggagtggaagtgctcggcacaaagctgtccgccatccagcaggcggaagaccgcgacttattccgtacgctgatgaatgagctgaatgaaccggtgccggaaagtgagatcatccgcactttacaggaagccgaggaatttgtcggccggatcgggtttccggttatcgtgcgccccgcttacacattaggcggaacgggcggcggcatctgctcgaatgaagcagaactgaaagagatcgtcgaaaacggattaaaactcagccccgtccatcagtgccttcttgaaaaaagcattgccggttacaaagagatcgaatatgaagtcatgagagacagcagagatcacgcgatcgtcgtctgcaacatggaaaatatcgatccggtcggcatccatacgggcgacagcatcgtcgttgccccgagccagactttgagcgaccgggaatatcagcttttgcgcaatgtttcattaaagctgatccgcgcgctcggcattgaaggcggctgtaatgttcagctcgcgctcgatcccgacagcttccaatattacattatcgaagtgaatccgcgggtgagccgctcatctgccctcgcctcaaaagcgacgggttacccgatcgcaaagcttgcggcgaaaatcgcagtcgggctttctcttgatgaaatgatgaatcccgtaacgggaaaaacatatgcggcttttgagcccgcgcttgactatgtcgtttctaaaatcccgcgctggccgttcgacaaatttgagtcggcaaaccgcaggctcgggacgcaaatgaaagccaccggagaggtcatggctatcggacgcacccttgaagaatcgctgttaaaggcggtccgctcactggaagccgatgtctatcacctggaactgaaggatgcggaagagatttctgacgggcttttggaaaaacggatcagaaaggccggagatgaacggctgttttatcttgctgaagcgttcagaagaggctatacagtcgagcagcttcatgagttttctgcaattgacgtattctttttgcacaagctctgtaagctggtcgcttttgaaacagagctgaaagcggaaaaaggcagccttaccgttctgcagacagcgaaggaattcggtttctccgacaaatatatcagccgggaatggaatatgccggaacaagagctgtatcaaatgcgaaaagaagcagacatcaagcctgtatataaaatggtggatacatgcgcggcggaattcgaatcagaaaccccgtacttctacagcacatatgaggaagaaaatgagtctgaggttacatcaagaaaaagcgtcgtcgtcctcggttccgggccgatccgtatcggacagggcgtcgaatttgactatgcgaccgttcattctgtctgggcgatcaagcaggcaggctatgaagcgattattatcaacaacaatcctgagacggtgtccactgatttcagcatttcagacaaactgtattttgaaccgctgacggtagaagatgtcatgcacatcatcgatttggaacagccggaaggcgttgtcgtccaattcggcggccagacggcgatcaatcttgcggaagaattgagcgcccgcggcgtcaaaatcctcggcacatcacttgaagatttagaccgtgcggaagaccgggataagttcgagcaggcgcttgaggcgctgaatgtgccgcagccgctcggaaaaaccgccgtatcggtgaacgaagcggtcaaaattgccgcatccatcggctatccggtacttgtccgcccttcgtatgtgctcggcggccgggcgatggaaatcgtctatcacgaagaagagctgcttcactatatgaaaaacgcggtcaaaatcaacccgcagcatccggtgttaatcgaccgttatctgacagggaaagaaatcgaagtcgatgccgtatctgacggcgaaacagtcgttattccgggaattatggagcatatcgagcgggccggcgtccattcaggggattcaatcgccgtctatccgtctcagtctttaagcgaagacattaagaaaaaaatcgaacaatacactgtagccttggcaaaaggccttaacattatcgggttgctgaacatccagttcgtactgtcgcaaggtgaagtgtatgtgcttgaggtaaatccgcggtcaagcagaaccgtgccgttcttaagcaaaatcacaaaaatcccaatggcgaacctggcgacaaaggtcattctcggccaaaagcttgctgatttcggctatcaagaggggctgcagcctgaacagcagggggtattcgtgaaagcgcctgtcttctcattcgcgaagctgagaagagtagatattacgttaggccctgaaatgaagtcgacgggagaggtcatgggcaaagattcaaccctggaaaaagcgctctataaagcgctgattgcttctggcattcaaatcccgaactacggctcagtgctgttgactgttgccgataaagataaagaagaaggactgctgatcgcgaagcggttccacgccatcggctataaaatcttggcgacggaaggaacggcggcttatttgaaagacgctcagattccggctcaggtcgtcggaaaaatcggcgaagaagggaaaaatctgctcgatgtcatcagaaacggcgaagcgcaatttgtcatcaatacgctgacaaaaggcaaacagccggccagagacggcttcagaatccgccgcgaatccgttgagaacggagtcgcctgcctgacatctttagatacggccgaagccattttgcgggtattggaaagcatgacattccgggcggatcatatgcctgcatccgaaaccaatcaaaaggcggcagccacgatatgaagaaagcgcatttgactgttcaatccaacttagaaattgccgaccggatttataagatggtgctgaaaggagagcttgtccggcaccttaccgagccgggtcaatttctacatctgaaggtgagtgacgcggtcacgccgctattaagaagaccgctcagcattgcggacgtcaatttcgccgcggatgaagtatccgttatctacagagctgacggtgagggaacgcgtcttttgtccgagaaaaaagagggcggcaggatagacgttctcggccctctcggcaacggattccccgtccggcggattgaacccggcaaaaccgcgctgttagtcggaggcggagtcggggttccgcctttgcaggaactgtcaaagcgcctgacggaaaaaggcgtaaacgtcattcatgtgcttggatttcaatcagcaaaggatgttttttacgaacaggaatgtcgtgcgtacggagacacctatgtggcgacggctgacggaacatatggagagaaagggtttgtcaccgatgtcatccgtgaaaagcagctcgaattcgatgtcctgctaagctgcggaccgacaccgatgctgaaagctctgaagcagcagtacggccataaagaggtttatctttcgatggaagagcgtatgggctgcggcatcggggcctgcttcgcctgcgtgtgccgcacgggtgaaagcgatacatcctatgtaaaggtctgccttgacgggccggtatttaaagctgaggaggtggcgctgtaatgttagaggtgaatctgccgggtctccaattgaaaaacccgatcatccccgcttccggatgtttcggtttcgggaaagaatatgccggattttacgatttatcatgcctcggaggcattatgattaaagccacgacgaacgaagcccgcttcggaaatccgacgccgagagtggcggagacaagcgcgggaatgctgaatgccatcggactgcaaaatcccggccttgagcatgtgctcaatcatgagctgccttggctcgaacaatttgacacgccgattatcgcaaatgtcgccggttctcaggtggacgactataaagaagtggccgagcacatcagccaagcgccgaatgtgcatgcgcttgagcttaacatttcatgtccgaatgtcaaaacgggggggattgcttttggtactgatcccgtcatggcggccgaactgacaaaagcggtgaaagaagtttccgcagtgcctgtgtatgtgaagctttcgcctaatgtcgcaaacataaccgaaattgccaaagcgattgaagcggccggtgctgacggtctgacgatgattaatacactcatcgggatgaggctcgatctcaagacgggacggccgatcttagcaaataaaacgggcggactgtcaggcccggcgatcaaaccggtcgccatccggatggtatacgaagtcagccaggccgttcaaatcccgattatcgggatgggcggcgttcagaccgcagaggatgcattagaatttcttcttgcgggagcgagtgcggttgccgtcggcacggcaaacttcgtcaatccgttcgtctgcccggaaatcatagaacagctcccccgtgtactgagccaacacggctttcaatctgtaagtgaatgcatcggaaggagctggaaacatgaaaaacaacctgcccatcatcgcgcttgattttgcatcaggggaagagactttaacgtttttagacttgtttgaaaaggaaaggctttttgtcaaaacggggatggaacttttttatcaggaaggccccgccatcattcaccaattaaaagaacggaactgtgatatatttttagatttaaagcttcatgatatcccgactacggtcaataaagcgatgaagcggctggccggcctcggcgttgatctcgtcaatgtgcatgcggcagggggcgcacgcatgatgcgtgcggcccttgaggggcttgaagaaggcacgccggcaggcagaaaacgcccgtctttaatcgcggtgactcagctgaccagcacttcagagcaggtggcgaaggaagagcttctgctgcataagccgctgttagaaacggtcgtgcattacggcaaaatggcggaagagtgcgggctggacggagtggtatgttcggtacatgaaacaaaagccatttatgaagcggtccggccttcatttctgacagtcacaccgggcatccgcacggccagtgacgcagctgacgatcaagtccggacggcgactccgtcatttgcgaaagaaaacggttcgtcagccatcgttgtgggccgctcaattacaaaagcggaaaaccccgttaaagcatatgaagcaattaaactggaatgggagggcgttcgccgatgaaacaggctatcgcaaaacatctattacacattgaagctgtctttttacgcccgaatgagccgtttacgtgggcgagcggtattttatcaccgatctattgtgacaaccgtctgacattgtcgtatccaaaagtgagaaatgatgtggcggacgggctcggcaaactgctgaaagagcattttcccgaggcggagatgatctcgggcactgcaacggcgggcattccgcatgctgcgcttctcgcagaccgtgcaggcgcaccgatgtgctacgtcagaagcaaaccgaaagcgcacggcaaaggaaatcaaatagaaggcgccattaagaaaggacaaaaaacagtcgtgattgaagacttgatttctaccgggggcagcgtgcttgaagctgcggcggcccttcaaagagagggcgcggaagtcctcggcgtcatttccatttttacatacggactgccgaaagcaaaagaagcctttaaaaaagcgggtcttccttattactcgttaacggattatgacacgctgattgaagtcgcgcttgaaaacggtacgattcattcagatgacattgagaaactgaaatcatggaaacagaatcccgagtcaaaagattggtttaaaaaataatgacaataaaaacaggcctcagggcctgttttattattcctatcaaaaaactcgggttgacttctgttagaattgtgctaaaatttagtacaaatctaaaaagcttatcaagagcggctgagggactggaccgatgacgcccggcaacctgcgtgtcatgcaaggtgccgcatccagaaaaatgcacagcattttgaagataagggctataccgggtcactgtctttcattccgctggattgaaagttttttatatgaaaaaaaagattgagggataagacaaccggcagaaaacaacagctgtttgattgtctccgggaggaggaaaggaaaaatgctaacgtatgacacatgggaagagccggcgattacatttccggaagacgattcctataaaggcgcgctgtccgttttaaaatgggcatacggccactacggagaccagcttgtttacgcgtgcagcttcgggattgaagggatcgtcctgatcgatttaatttctaaagtaaagaaagacgcggaaatcgtgtttcttgatacgggtcttcactttaaagaaacatatgaaacgatcgaaaaagtgaaagagcgttacccgggactgaacattatcctgaaaaagccaagccttactcttgaagaacaggccgaggctcacggagataaactgtgggaaagagaaccgaaccagtgctgctacatcagaaaaattctgccgttaagagaagcgctcgcgggacatccggcatggctgtccggtcttcgccgggatcaagggccgagccgggcgaatacgaatttcctgaataaagacgacaagtttcaatcgattaaagtatgcccgctgatccattggacatggaaagacatctggagatatacttccaagcatgagctggattacaatatcctccatgatcaggggtatccgagcatcggctgtgaaccgtgcacttcacctgcgtttaccgcggaagatttgcggagcggcagatggaacggcatggcgaaaacagaatgcggactgcatgaataaaggagctgcacgatggaattagccgctattttattctgcctgttttttgccatgaatatcggagccagcggagccgcggcttcaatgggagtcgcttacgggtccggcgccgttaaaaagaaaacgtatgcgctgatcatctgcgcggccggagtcctgtcaggggcggttatcggcggcggtgaagtcgttaagacgatcagcggcggaattattcccgaacaaaccattacgctcaccattgtctgcattattatcggatcggcggcgctatcgttattcacggcgaatgtgctcggcattccgctgtcgacgagtgaggtcactgtcggggcgattgtcggtgtcggcgtcgcgtacaaagtattgtttttacagcatcttttagtcatcgtgagtttttgggtgcttgtaccgttcgtcgcgttctgtttcacgtttctcgtctcaaaggtattcagttctctgaatattcgagtcatttcgaatcggaaacagaagattttagggattgtgctgctgattgcggggttttgggaagctttttcagccggaatgaacaatgtcgcaaatgcggtgggccctttggttgctgcgggcgtgctcagcgtgtccaaaggaacgctgtacggaggcatctttgtcgctctcggcgctctgcttttaggacgcaaagtgcttgaaaccaacgggaaaaagattacgagattttcagccggagaaggcatactgctttcaggaaccggcgcggggcttgtcattatcagttcagtcttcggtctgccggtcccattggcgcaagtcacatcatcatcaattatcggtatcggaatggccaaaaacgggccgaacgtttttcataaagaagtcgtgaaaacgatgctcaaagtatgggtcgtttcgccgtttttgtcactgtcgatttcgtatttgcttgtctccctgctgttaaaaggagattactattccatctttatgatggccagcgtgcttttggcagctggcggagccgccagtctgatgaaagccatccgaaaagagaaacgctctgtccatgaacaaggcggaggcatttaactattaatctgagtttatttatctgttaactgggaggaatcatgtattatgagtttagcaccgcacggaggaacattaattaatcgggtaaatgagcagtatgatcttacatccgtccaaaaagaaattgagcttgatttgatttcgttcgctgatttagagctgatcgggatcggggggtacagcccgattgaaggatttttcacagaaaaagattacgtgtcagtcgttgaaaatatgcgtctggcatccggggttgtctggtccctgccgatcacgcttccggtcgattcagaaaaagcggctgagcttgccgtcggcgacacggtgaaactgacttacggcggagaaacatacggcgtagtcgacatcgaagatatttatacgccggataaacaaaaagaagccgttcacgtatataaaaccgatgatgccgcgcatccgggcgtgaaaaaattattttcacgcggcgatacgtatgtcggcgggccgatcacattagttaaaaaagcgtcaaagcagtttcccgagtttacatttgaacctgccgatacaagacgaagcttcgaagaaaagggctggaaaaccattgtcggtttccaaacgagaaatccggtccaccgcgcccacgaatatatccaaaaaaccgcgcttgagacggttgacggcctgtttttgaacccgctcgtcggtgaaacaaaatcagatgacattccggcggatgtcagaatggaaagctaccaggtgctgctcgatcattattatccgaaagaccgcgtgttcctcggcgtatttttggcggctatgcggtatgcggggccgagagaagccattttccacgcgcttgtccgcaaaaactacggctgcacgcattttatcgtcggccgcgatcatgccggcgtcggtgattactacggcacatatgaagcgcaagagctttttgatcaatttacagcggatgaactcgggattacaccgatgaaattcgagcacagcttcttctgccagaaatgcggcaacatgggaacggccaaaacatgcccgcatgacagagaagaccacgtcattctgtcaggaacaaaggtcagagaaatgctgcgaagcggcgtcatgccgccggcggaattcagccgtcctgaagttgtcgaggtgttgattaaagggctgaaaacgaaagaagaagcaggcgtttcttaaggaggaaaatagagtgacaaatcgtgatatcgtgtggcatgaagcctcaataacgaaagaagaataccagcagaaaaacaagcataaaagctctatcctctggctgacgggcttaagcggttcaggaaaatccacgattgcaaacgccgcagcgcgcgagctgtttgaacaaggctatcaagtcatcgtgcttgatggtgataacatccgccacggcttaaacaaggacttaggtttttccgatgatgaccgcaaggaaaatatacgccgcatcggggaagtggcgaagcttttcgttcagcagggaaccatcgtcatcacggcttttatttctccgttccgtgaggacagagatcaggtgagagagcttgtggcggagggcgaatttaatgaaatctatgtgaaatgcgacctcgatatatgtgaaaagcgcgatccgaaaggtttatataaaaaagcaagaaatggtgaaattccgttctttacggggatcgactcaccgtatgaagagccgaaagcgcctgagctcgtacttgattcaggcaaatgtgaacgcgaagaatgcaccggaagactggttgactttgtgaaaaacagcttagcataataggtccaaaaaggccgcgcaatcagccggatatcccccgcaatggcgggatatggtaaaatagctgaagtgcggcctcgcggctgttctgggaagatttcaaaacggatcggggagacatgctatggggaaagtatttatcgttggagccggtccgggagatccggacttattaacggtgaaggcaatgaaagccatacagaaagcggacgttatattatatgacagattggtaagcaaagagattttacagtatgccggagaagaagcggatctgatttactgcggcaagctcccggattttcacattatgaaacaggatacgatcaaccgtttccttgtgaagtatgcgaaaaaggggaaaaccgttgtaaggctcaaggggggcgacccgtttgttttcggccgcggaggcgaagaagcggaggctctcgcacaaaacgccattccgtttgagatcgttcccggcattacatcaggaatcgcggctgctgcttatgccggcattcccgtgacgcacagagaggcgagctccaatgtcgcattcgttacgggacattataaacaagaagacgactttgaagaaaaatggaaagcgctggcgacgggcattgatacgctggtgatttatatgggaattaaaaatatccggcagattgaaagaatgctgctggaaaacggcagagacgccggcaccccggcagcctttattcattggggaacgacggacaggcaaaaaacagtcgtctgcaccgtcggcacgctttcagacacagtgataaaagaagaaatcaaaaacccgagcttaattgttatcggcgatgtcgtcaattatcactgcaaactggactggtatgcatctgaacagaaaaatctggatttgagcgaggcgttgtaaatgaagcaggcgattttatacatcgggcacggaagcaggctgaaaaaagcgcagacagagtcggcggcgtttttaaaagggtgcatgccgcacgctgacgctcccattcaggaaatttgttttttagaactgcaggaaccgtctattgaagcgggatttgaagcatgtgtcagacaaggcgccactcatattgcggccgtgcctttgctgctgttgaccgctgcccacgcaaaacatgacattccggctgaaatcgcccgtgcggcggccctgcatcccgatataaaagtgacatatggtgttccgatcggagtggacgatgaagtcgtaaaagcggtgcatcatcgcattgaagataccggagtgcccattgagcaggcgaaagtggtgctgatcggaagaggaagcacagatccggcagttaagaacgcagtcagtgagattgccggaaaacttgaggcgattacacctgttaaagaagtcatcccttgttttttaacagcatgtgatccgcactataaagaagtgtttgccggctttgaagaggatgacggagcacccgtttttatcgttccatatcttctgtttaccgggcttttaatgactgagattgaacgggaagttcaaaagcttcaaacggtcaatcaaaatgttcatctcgcttcatacttaggttttcacccgcatattaagcaggcgtttttgaaccgtgtgtcagaagctgttcgaaaccccggcggtcagtttgattttaaggggggacagtatgctgcctctgcacattaatttaagcggaaaaagaattatcatcgcgggcggaggcaatgttgccttaagaaggctcaaaacggtgcttccggaaggcgcggatattactgtaatcagtcccgatgccctgcccgaaattaaacagctggcggatgaagggcgcatccgctgggtttcccgtaaaattgaaatgaaggatctcgcgcccgcttttttcatcattgccgcgacaaatgaccgcagcgtgaatcaggagatagccgcgagcgcttctgaaacgcagctggtcaattgtgtaagcgatgctgaacagggcagcgtgtatatgccgaagatcatccgcaaagggcgcattcaagtatccgtatcaacaagcggcgcaagcccggcacatacgaaaagactggctgaggacttagagcctctcattactgctgatttggctgaagaagtggatcgattatttgagaaaagaagaagaccataaaaaacaccttgtctgtcatcaggcagggtgttttttatactgtcctcacagtccccgaatgtgaacaattcaaaacgaaagcgggcagtttgaacggtatatgccggcaagcggtcagggttgcgaagtgatgcggaatatgtatctgatcccaattccgcctggattccgcccgcatacaaaggaaaggtcagagacccgcccggatgtgctcaggtgcggcgagggaaggtgacagtatccgccgccaaatcaggtgtgaccgctttaatcagagacggcccccggcggatcaggcagacatgacgggaaactgatcagatactgtatagatggttctgacggctgggagagtgtcgtctccgtttataagtaataaaaaacacctccaagctgagtgcgggtttcagcttggaggtgcgtttattttttcagccgtatgacaaggtcggcatcaggtgtgacaaatacggtatgctggctgtcataggtgacaaatccgggctttgcgccgtttggctttttcacgtgtctgatttttgtataatcaacgggaacggagccggaatctttcgccttggaaaaataagcggcgatcgcagccgcctccagtatggattgttcatccggatcgctgcttttaatcacaacgtgggaaccgggaatgtctttcgtgtggaaccataaatcatcccttgcggcagcttttgtcgttaagtattcattttgtttattgtttttgccgacaagaatcgtcaatccccgtgaagattcatattgctccaaaacaggaacgtgctgcttctgttttttctgtcctcgctgctgtttcggtcgcagatatttgccttccacaagctcttcccttatttcgtgaatatcctttgtggaggcggaggagagctgctggatcagctgatcgaaataagcgatttcctcctcggccagacggatctgttcttttaccacctcgacggaattcttcgccttttgatactttgtaaaatacatctgcgcgttttctgaaggtgttttgttcggatttaaagggatggtcactgtcttactttcttcatcataataattgatgacttccgcttctttgtcaccttttttcagcatgtacaaattcgccgtcagcagttcgccgtatagctggaattccttcgcattttctgagtagtcgagcgtcttttccagcttttttatcttattggcgttctttttccgttcatttgcgacaaaccgctcgagatcctgagcctgctgtttgacgcggtcgcgttccgccttgccgaaataaaaccggtccaacagctcactcagtgagtgaaaggtgcgctcctcaccgtttacatgtgtgagagacaggagataaaagtattcctttccgccggctgtcgtaatgttcggtgtaaacctgcaatctttcacggcatggaacatttcaatcagcgtcttcggcagcgttattttgttagcgagacccgctctgtgcacggcttcttttgcaaacagcggagaaacaccggagaagtgtctgacgatctgctggtcaagccgtccttcctgaaaactgagataacgcaaaacgtcctcttcatccgcggcaagcggcgaaattttttcctgagcgggaggaagcttgtaatcatatcccggcagaacggtccggtagctgttcatcgacggagataaatgcttcagtccgtcgatgatggctccttctccgtcagtcaggataatattgctgtgccgtcccataatttcaacatacagtgttctgacggtttcgtcgccgatttcatttctgctttttatccggaatatcataatccggtctaatccggcctgttctattttctcaataaatccgccttctatatgctttctgagcagcatacaaaacatcggcggctcgctcggattttcataggcctggtttgtcatgtgcacccgtgaatagctcggatgcgccgataataataatttatggttttttccgttagcgcggatatgaaatatcacatcgtgcttaaaaggctgatggactctcgtaatccggcctccggcgatccggctgtttaattcatgtgtcattccgtatgtaaacatgccatcaaaagacatataaaacaccctttccttcttcctgcattcgataattatagcatgaaaagggacgagtcagaataagcttgtttacagagtgacatctctaaagcgaggcaggggagtggacgagaagaatgaagtttcatgaaatgggacaaaccgatttgctgaaagcaacaaatacgtccattaaacaggggttgaccgaaaaagaggtgaaaaaacgccttgaaaagcacggaccgaacgagcttcaggagggcaagaggacactggcgatcgccgtgtttttcgcccaatttaaagattttatggtgctcgtgctgctggcggcaaccttaatatccgggtttttaggcgaatatgtagatgccgtagcgattatggcgattgtatttgtcaatggggttctcggtttttttcaagagcggcgggcggaaaagtctttacatgcattaaaagagctgtcaacgccgtatgtgtcagcgttgcgggacgggagctggaagaaaattcagtccaaggagctcgttcccggcgatatcatgaaattttcaagcggcgaccggattggcgcggatgtgcggatcgttgaagcgaaaagccttgaaattgaggaatcagcgctgaccggggaatcaattccggtggttaaacaagctgataaactgagaaagccggatgtttcgttaggcgacatcagcaatatggcgtttatgggtacgatcgtaacgcgcggcagcggtgtcggcgtcgtcgtcggtacaggaatgaatacggcaatggggaaaatcgccgatatgctggaatccgccggcagcctttcgacaccgctgcagcgaagacttgaagagctcggcaaaattttaattatcgtcgcgctccttttaacggtattggtcgttgcagtcggcgtcttacagggacatgagctttacagcatgtttttggccggggtgtcattggccgtcgctgcgattccggaagggcttcccgccattgttacggtggcattatcaatcggcgtccagcgcatgatcaaacaaaaatcaattgtcagaaagctcccggcggttgaaacattgggctgcgcctctgtcatttgttctgataaaaccggcacgctgacacaaaacaaaatgaccgtcacccatatgtggtcagggggaaaaacatttaaagtgtcaggcatcggctatgagccggagggcgttttcacccgagatgagcgggaaatcaagccgaaagatgagaagattcttgaacagatgctggttttcggcgcgttgtgcaacacatccgaaatcgcactgaaagacggccattatgtactcgacggcgatccgacagaaggagcgctgctgacggctgcaagaaagggcggctattcaaacgattggctcagcgggcactaccgcgtggttgccgagtttccgtttgactccgtccgcaaaatgatgaccgtcattgtagaggatcaggaaaaaaagcagttcgtcatcactaaaggagcgcccgatgtgctgattgaccgctcgtcacatctgatgtacgacgcaagaagcgcgccattttcaggagaaaagaaagcagaaacggaagcggttctgaaagagctggcgtcgcaagctttgcgtacgatcgcgattgcttataaaccgcttaagcccggagaaaagccgacaatggagcaggcggaaaaaaatctgacgatactcggcttgtcaggcatgattgatccgccccgtccggaggtcagacaggcgattaaagaatgccgtgaagccggcattaaaacggttatgatcacaggggatcacgtcgaaacggcaaaggccattgcaaaagatttgcgtcttcttccgaaaaaggggcgtgtgatggacggcaagacgctgaatgagcttacggagaaagaacttatcgaaacggtcgatgatgtctacgtcttcgcacgcgtgtcgcctgaacataaattgaaaatcgtcaaagcgttccaggaaaacggacacgtcgtcgccatgacgggagacggggttaatgacgcgccggccataaagcaggcagatatcggcgttgccatgggcgtgacgggaacggatgtggcaaaggaagcctcttctctcattctggtagatgataactttgctacgattaaatcagccataaaagagggacggaatatctatgaaaatataagaaaattcgtccgttatttgctcgcctccaacgtcggtgaaattttagtgatgctgtttgcgatgcttctcgctctgccgctgccgctcgttccgattcagatattgtgggtgaacttagtcactgacgggctgccggcgatggccctcggtatggatcagccggaaggagacctgatgaggcggaagccgcggcatccgaaagaaggagtgtttgcgagaaaactgggctggaaagtcgtatcaagagggtttttaatcggagctgcaaccattttagcgtttatcatcgtctatcaccgcaatcctgaaaatctgccctacgcacagaccgttgcattcgcgactcttgtcctggctcagcttatacacgtgtttgactgccggagcgaaacgtctgttttctcccggaatccgtttgaaaatatctatctgctcggggccatcatttcttctatcttcctgatggtcatcgtcatctattatccgccgctgcagccgatattcaaaacagtgccgattacgccgggcgattggatgctgattatcggtatgtcgggcatacctacttttttgctggcgggttcacttttgacaagaaaaaaataattccatatgatataatcttaggggtaatagcatgtctattgcccttttattttgataacgggaaagaattgggtgtttcatatgatacggagtatgacaggcttcggcagcgcaagcagcacaaaaggcgatctctcggcaaccgttgaattgaaatccgtcaattaccggttcaaagaagtgaacgcccgcctgccacggcctttgctatatgtagaggataagctgaaacaaacgatattgcagcatatacagcgcggaagagtagagctgtttctcactgtaaacagtgacgcgctcataaaaagaagcctgaacatcgattgggagctccttgatgaatatgtgagcgccgcacgcgtcatgaaagagcgctacagcctggccgcagaacccgatgcaatggagttctttaaatttgaacatattgcgcagatacacgaagaacagatgcgtgatgacaagcttgaagaagtcatcagggaagccgctgagctggctgtaaaggaactttgtgacatgagggaaaaagaaggacggcttttggcggaagactgctttctgcacatcgagcggcttgagacgctgtccgaacaggtgaaagagcgcgcttctgccgttgttattcaataccgcgagcgtctttacgcccgaatgaaggaatggacggaggatgcgctcgacgaaagcaggctgatcacggaatgcgccattttcgccgatcgttctgatataacggaagaaattaccagattgaagagccattttgttcaattccgtgatatattaaaagaaggcggggcagtcggccgcaaacttgatttccttgttcaggagcttaaccgggaagcaaacacgatcggctcaaaagccaatgatcatcaaatcacaaagcttgtcgttgaaatgaaaagttctattgaaaaattgaaggaacaagtgcaaaatatagaatagcgactgtgcgtattgtttacagacggcctcttcaggttacactagagacgtctattttacagggggaacgtagaagatgacgattaaactgattaatatcggatttggcaatatcatctccgccaatcggatgatttcgattgtcagcccggagtctgcgccaataaagcgaatgatccaggatgcaagagaccgcggaatgctaatagacgctacatacggacgaagaacccgtgcagttgtcgtcatggatagtgatcacattatcttatctgccgtccagcctgagacagttgcacacagactttctgtgaaagaagaaattatggatgaagggcaggggtaattgccgcatgaaagaaagagggttattaatcgttctctcaggtccctccggagttggaaaaggaacggttcggcaagcaatattttcacaacaggacacgaaatttgaatactcaatttcagtcacgacgagaaacccgagagagggcgaggtcgatggcgtcgattatttctttaaatctagagatgaattcgaacgcatgattgaaaacaacaaactgcttgagtgggcagaatatgtcggcaactattacggaacgcccgttgattatgtcgaacagacgcttcaagaaggaaaagacgtcttcttagagattgaagtgcagggcgcgctccaagtgcggaatgcatttccggaaggcctgtttatcttcttagcgccgccgagtctttctgagctgaaaaacagaatcgtgacaagaggaactgaaaccgacgatttaatcgaaaacagaatgaatgccgcaaaagctgaaatcgaaatgatggacgcgtatgattatgtcgttgaaaacgacgatatccaaacggcttgtgataagattaacgcaatcgttctcgccgagcacttaaaacgtgaacgcgtcgctccgagatataagaaaatgctggaggtagaataacttatgttagatccgtcaattgactctttaatgaataaattagattctaaatatacgctggtgaccgtgtctgcaagacgcgcgcgtgaaatgcagatcaaaaaagaccagcagattgaacataccatttctcacaaatatgtaggcaaagctttagaagaaattgacgcgggcctgctttcgtttgaaagagaagacagcgaataacaagcacacgtagcaacctatctctacataggttgttatttttttccgtttgggatttgtccaatgctttcataaaggggagaagacttcatgaaaaaccgaaacattttgctatgcgtaagcggaggaattgccgtttataaagcttccgcactcacgagcaagctggttcaggccggcgcaaacgtcaaagtgattatgactgagtccgcgcgtgagtttgtttctccgctgacatttcaggcgctgagccggaatgaagtatatacagatacatttaatgaacaaaatccgaaggtgatatctcatattgatgccgctgactgggcggatttaattattgtcgcgcccgctacggcaaatatcatcggaaagcttgccaacggaattgctgacgatatgctcacaacgacggtgctggcggctgaggccccggtctgggtggcgcctgcgatgaatgtccatatgtatgatcatccggcggtgaaacggaacatctctgtgctttatcaggacggggtccgctttatcgaaccgagtgaaggctatttggcatgcggatatgtcggcaaaggaaggctggaggagccggagcttattgttgagcgtgtcagagagcattttaaggagcctgaagacgatgcgccgctgaaaggaaaacatattgtcattacggccggtccgacgcgcgaagccgtggaccctgtccgcttcttcacaaataaatccaccggcaaaatgggctacgccgctgctgaagccgccgtccgtctcggggcacgggtgacgctgatttcaggcccggtgtcaatagagccgccagtcgggctgtatcagtttcttcctgtgcaatcggcagccgatatgagagaagccgtgctttctgtgtttgattcatgcgacatggtgattaagacggcggccgtggccgattttacgccggcggctgtttctgatcacaaaatgaagaagaaagacggttcgctcgtgatcgaattcaaccgtacagcagacatactgaaagaactcggcgaacggaaaacacaccagctgctggtcggttttgcggctgaaacgcaagacgtcgaacgctatgcgcgcagaaaactcgaacagaaaaaccttgatatgatcgttgcgaatgatgtgaaagcagaaggggccggatttggcacggatacgaatgtcgtcaccttctatttccgggacggaagaaaacgggagcttgcgcttatgtctaaacttgacgtttcctttgaaatgctgaaggaaatgaccgctttgaaagccgaggaccgaaaacccgtatgaatgtagcagaagtcattgtcgatgtcagctccaaaaacattgacagaccctttgattacaaaattcccgatcatttaaaagggatgatcgaagtcggcatgcgggtgattgtcccgtttggcccgcgcaagcttcaaggatttgtgaccggtttgaaagattcgtctgaattaaacggcggctcaatgaaggaagtcgagaagcttcttgatttgacgcccgttctgactgaggaactgatgcagctgtcttcatggctttctgacaaaacgctgtcgtttaaaatcacggcgcttcaggcaatgctgcccgccgcactgaaggcgaagtacgagaaagagctgaaagtcgttgacgaagaagcactgacaccggacatcaaacagcttttcaggaatcaaaaaagtcttttgtactcggatattaccgatgaaagcattctttcgtcacttcagaaattcgtgcgcaaaggaagcattgatgtcacatataaagtcgcccaaaaaacgaataaaaaaatgatccgcatgatcgaagcgggggcggacaaagaagaactcgcccggcacgcagattcattgacaaagcaggcttctaaacagctcgccgtacttacttattttatcggcgggggagcaaagatttccgcggccgagctttgcaaaaagaccgattccagttccgcgacgctgaaaacgcttcttaaaaaggggcttcttacggaaagctttgaggaggtttaccgcgatccttatcaggacagaatgttcaaaaaaacagagccgctctctcttacagaagagcagcaggccgcttttgagccgattaaacaagctgtagccgatcatgtccatcacgtctttctgcttcacggcgtcacgggaagcggcaaaacggaaatttacctgcaatccattgagaaagtgctggcaaaaggacaagaagccatcgtgctcgttccggaaatctcgttgacaccgcaaatggtcaaccgttttaaaggccgcttcggctcacaggttgcggtcatgcacagcggattatccacaggtgaaaaatacgatgaatggcggaagattcagcgcaaggaagtccggcttgtcgtcggagccagatcggccatctttgccccgtttgaaaatctcggcatgatcattattgatgaagagcacgaatcttcctataagcaggaggaaatgccgcggtatcatgcaaaggacgtagccatccgccgggccgagcatcacagctgtccggtcgtcctcgggagcgccacgccgacattggagtcatttgcgcgggcgaaaaaaggcgtttatgagctgcttccgttaaaacatcgcgtgaatcgccagctcatgcctgacgtttctctcgttgatatgagagaagaactgagaaacggcaacagatcaatgttttcaagagaactgatggaacagctggaagagaagcttgcaaaaaaagagcaggccgtcctttttctgaataaacgggggtattcctcgtttgtgatgtgccgggactgcggttatgtgccgcaatgtccgcattgcgacatttcgatgacttatcaccgctacggacaaaggctgaaatgccattactgcggccatgaggaacctgtcccgggaacatgcccggaatgcggcagcgaacatatccgctttttcggcacgggaacgcagcgtgtggaggaggagcttaccaaagtgctgcctcaggcgcgcgtgatcaggatggatgtggacaccacttcaagaaaaggcgcccatgaaaaactgttgtcagcgttcggtgaagggaaggcggatatcctgctcggtacgcaaatgatcgcaaaagggcttgattttccgaacgtgacgctcgtcggagtattaagcgcagatacgacgcttcacatccctgatttcagggccgcggagaagacattccagctgctgacgcaggtaagcggccgggccgggcggcatgaaaagccgggaacggtggtcattcaaacgtatacaccgtctcattacagcattcagctgacgaaaacgcacgactatgaaactttttttcagcaggaaatggcgcacagacgggcccagtcatacccgccttattattacgtggcgctggtgaccgtttctcatgaagaagcggcaaaagccgcggtcaccgcagaaaagattacaaactatttaagagcgggatgcgggcctgatacgaaaattctcgggccggcggcttccccgatcgccaggatcaaagatagatatcgctatcaatgcgtgataaaatacagacaggaaaacgagttgcagattcagttgaaaaagatactggagcactataaacgcgacattgcgcaaaagcatgtcatgatttcaatcgatatgaatccgtacatgctaatgtaacattagtttttggagggcaaaattttggctgtgaaaaaaatcgtcacacacccggcggaggttctggaaacacccgctgatgaagtgacagtgtttgataaaaaattaaaaaaattgcttgacgatatgtacgatacgatgctcgaaatggatggcgtcggcctcgccgcgccgcaaatcggcattttaaaaagagcggccgtcgtggacatcggtgaagaaagcggccggatcgaccttgtaaatccggttattcttgaaaagagcggtgaacagaccggagtcgagggctgcttaagctttcccggggtttacggggatgtcacccgcccggattacgtaaaggtaaaagcctatgaccgtaaaggaaaaccgtttattttagaagcggagggttttttggccagagccgttcagcatgaaatggatcatttagacggcattttattcacatcaaaaattacggcttactacactgaagaagaactggcagaaatggaaggatgattggatgacaaggatcgtttttatgggaacgcccgatttttcagttcccgtcctgcgcacgcttattgaagacgggtatgaagtggttggtgtcgttacgcagcctgaccgcccgaaaggcagaaaaaaaatcatgacgccccctcctgttaaggctgaagctgaacgtcacggcattcccgtgcttcagcccgaaaaagtaaggctcgaagaagaaatagaaaaagtgctcagcctgaagccggacctgattgttacggcggcattcggacagatcctgcccaagcagctgctggacggcccgaaatacggctgtatcaacgtacacgcgtcactattgcctgaattaagaggcggagcgccgatacattattcgattctccaaggcaagaagaaaacgggcgtgacaatcatgtatatggttgaaaagcttgatgcgggcgatatgatttcgaaaatcgaagtggaaattgatgaaacggataacgtcggcacgcttcacgacaaattaagcatagcgggggcaaagcttttgtcagagaccgtcccgaacgtcatttccggaaatattaaaccgatcaaacaggacgaatcaaaagcgacttacgcgcctaacattaagcgtgagcaggagcggattgattgggcaaagcccggagaagagatctacaaccagatcagaggtttaaacccttggcctgtcgcctatacaactttgaacggtcaaaatatgaaagtatgggcttctgaaaaagttgcggcaaaaactgaagctgcgcccggaacagtcatccgcacggagcaaaacggcattgtcgtcgcatcaggaaacagcaccgcccttttaatcacagagctgcagccggcgggaaaaaaacggatgaagggcgaagattttgtaagaggcaaaaatgtgcagcccggtgacgtgttaggagaagcaaatgaagaaaattaatgtccgggagctcgcccttgaagcgcttgagaagcttgagcaaaatcaggcatacagcaacctgcttcttacatcggttatcaaaacgaacacgctcagcgatcaggacagaggactgctgacagagcttgtctacggaacactgcaaaataaaatcgccttagactacatgctgaagccttttatccgcaagccgaataaagtgaagccatgggtgattcagctgcttcgtctgtccgcgtatcaaatggagtatttagaaaaaataccggatcgcgccgccattcatgaagcggttgagatcgccaaaaaacgcgggcataagggcattgcgtcctttgtcaacggcatcctccgctccctgcagcgtgaaggggcgccgtcattcgctgaaattgaagacccggttctccgtctttccacagagacaagccatcccgagtggctcgtaaaagagtgggtcgaggcgtacggctttgaggcagctgaaaagatctgccggattcatctcattccgccgaagcagacgctccgtgtcaatcacataaagagcgacagggaaacggtgctgaatgagatggagaatgccggtcttgaagctgaagccggagacctttcttctgatgcgattaagcttttaaaaggaagcatcgcgaacacggcatttttccaaaacggccgggtatccatacaggatgaaagctcaatgcttgtcgcgcgggcgctggacccgaagccgggcgaaaccgttttagacgcatgcgccgcaccgggcggaaagtcggctcacattgcggaactgatggagaacgaggggagcctcacatcgcttgatcttcaccgccataaagtgaagctgattaaagagggcgcagaacggctcgggcttacgatcatcgacgcacaaacgatggatgcgcgaaaagcgggagaggcctttggcgcagaacggtttgaccgtgttctcgttgatgccccttgctcaggtttcggcgtcatcagaagaaaacccgatatgaaatatacgaagacgccggaggacagcagacggctgtcagaaatccagctcggcattttaagggaaatcgccccattagtaaaaaaaggtggcacactcgtatacagtacgtgtacaatggaccggacagaaaatgaagaagttatgcatgcgtttatacaagaacaccctgagtttgaacccgatttgtctcttgaaaagcggctgcctgaaaaggcgagaccctttgttcaggatggaagccttcaaattcttccgcattatttcggaacagacggtttctttattagcagcatgagaaagaagggataaaaaatgacacaattaaaaaagacaagcgtacggaaagagctgcggactgagcagccgtccatttactcttttgaattagatgaaatcaaacaatggctgaccgagaatggcgaaaagccgttccgcgcagcacagatttttgaatggctctatgaaaagcgggtttcttcatttgatgaaatgacaaacctctcaaaaagcctgcgtgaaaaactcgagagcaattttgtgctgacaacgctgaaaacggctgtaaaacagacatctcaagacggcacgatgaaatttttatttgagcttcatgacggttatacgatcgaaacggttttaatgagacacgagtatggtaattctgtatgtgtaacgacacaggtcggctgccggatcggctgcacattttgcgcgtcaacgctcggcggactgaaacggaatcttgaagcgggagaaatcgtcgctcaagtcgtgaaagtgcaaaaggcgcttgatgaaacggatgaacgcgtcagctcagtcgtcatcatgggaatcggagagccgtttgataatttcaatgaaatgctcgctttcttaaaaatcattaaccacgataaagggctgaacatcggagcgcgtcatatcacagtttccaccagcggaatcattccgaagatttacgatttcgccgatcaaaaaatgcagatcaatttcgcgatttctctgcatgctccgaatacggaaatcagaagccgtctgatgccgattaacaaagcctataagcttcctgaccttatggaggccgtcaaatattacatcgagaaaacaggcagacggatcagctttgaatacgggctgttcggcggcgttaatgatcaggtcgaacatgcagaagagcttgcagaactgttaaaagacgtgaaatgccatgtcaatttaattccggtaaactatgtgcctgaacgggattacgtccgcacaccgagagatcagattttcgcattcgaaaaaacgttaaaatcccgcggtgtaaatgtcacgatcagaagagagcaaggccatgacattgacgcggcctgcggtcagcttcgcgcgaaggagcgtcaagacgagacgaggtgaagaggttgattacagccttgaaaacagatacaggtaaagtccgccggcataatgaagatgcggcgggcattttcacaaaagaagacgcggtgcttgcggttgtcgccgacggcatgggcggtcatcttgccggagatgtagcgagcaggatggcggttgcggcgatggaagagcagtggaaccggaccgaaacggttccatctctgccgtctgcttgcgaggattggctgaaagaccggattcatgaggcgaatgtcaaagtacatgaccacgctaaagcgaatgaagaatgccggggaatgggcaccactgttgtttgcgccttattcaccgggaagtttgtcactgtggctcatatcggtgacagccggtgctacctgcttcaagagggggaattcactcagctgactgaggaccattcgcttgtgaatgagctggtcaagacaggagaaatttcaaaagaggacgccgagcaccatccgcggaaaaatgtattgacgagagcgctggggacagatgaaaccatcagtcccgacgcccgttcttttgaactgtctgacggcgatcagctgcttttatgctctgacggactgtcaaataaaatagaagatcacgagatcaaacaaatgcttcaagccgaatctgatcctcaggaaaaagtagaccttctcatcagcaaagcgaatcaaaacggcggcgaagataacatcacggctgtgttgattgagttttccgcagatgcaaaagagggtgaagacaagtgctaaccggcaagcggatcagcgggcgttatcatatcctccggcccattggcggcggcggtatggcaaacgtttttttagctgaggacatcattctcgaacgtgaagtcgcaattaaaattctgcggtttgactttgtgaatgacattgattttatcaggcgtttcagaagagaagcacagtcggcatcaagcctcgatcatccgaatatcgtcagtatttacgatatcggggaggaaggcgatatttattacattgtcatggaatatgtggaaggcatgacattaaaggaatacataaacgcacacggaccgcttcatccgaaagaagcgctgtccgttatggagcagatcgtctcggccatcgcccatgcccatcaaaaccatatcgtgcaccgggatattaaaccgcacaatatattgatagatcatttagggcatatcaaggtgacggatttcggcatcgccacagcgcttacgtctacgacaatcacacatacgaattctgtgctgggctcggttcattatttgtctccggagcaggcgagaggcggtctggcaacgaaaaaatcagatatttacgcgctcggcatcgtgctgtttgagcttttaacaggtaaaatcccttttgacggagaatcagccgtcagtatagcgctaaagcatctgcaaacagaaacgccttccgccagaaagtggaacccttccattccgcagagcgtcgaaaacattattttaaaggcaaccgctaaagacccgtttcaccgctatgaaagcgccgaggacatggaagcggacatcagaacggcttttgacgccggcaggctgaatgaacaaaaattttccgtgccggatgatgaggaaatgacaaaagccattcccgttattactgacggcgcaaaagccgcgcctcaggcggaaacgccgggggagacggatgataaggaacagcagcccgccaaaaagaaaaaacggaaatggccgtgggttttgctggccgtctgtttcattttcattatggcggctgttcttgcggtcaccgtgtttccgtctttgtttatgcctaaagatgtaagcgtccccgacgtacggggcatgaagtacgaaaaagcggaagccctgcttgaaaagaacgggctccgggcggatcctgatataacggatattgaagatgaaaaaatagaagaggaattaatggtcaaaacggacccaaaagcggggtctaccgttaaagaaggctcttctgtaaaactgtacaaaagcatcggaaaaccgaaaacccagctgatcgacgtgaaagggcggcagatcggcgacgcaaaaaaagcgctgaaggaaaaaggcttcaaacatgtcaatgtcaaagaagagaacgatgacagcgaggccggcactgtaattgatcagaacccgtcagccggcaccgatatggtcgcaagcgacgatgaagtcaatctaacggtcagcctcggccccgcggatgttacgctgagggacttaaagacttacagcaaagaagcggcttcagggtatcttgaagataacggcctgcagcttgttgaaaaacaagcccattcagatgacgtgccggaaggacaagtcatgaagcaagagccggcagccggcactgcggttaagccgggaagtaatgttgaagtgacgttctcgctcggacctgaagaaaaaccggcgaaaacggtaaaagaaaaaatcagcattccttacgaacccgaacatgaaggggacgagcttgaagtgcaaatcgccatcgatgataaggaccacagcatctctgatacgtatgactcatttaaaataaaagagccgactgaaaaaacaatcgaactgaagattgatcagggacagaaggggtattatcaagtgatggtcgatcataaagtcgtcagctacaaaacgattgaatacccgaaagataatgactgacaaggagggaccctatgcctgagggcaaaattataaaagcgttaagcggattctattatgtcttggatgaatcacaggacaagatcattcaatgcaggggccggggcattttcagaaaaaataaaataacgcccctggtcggcgattatgccgtttatcaggctgaaaatgataaagaaggctacctgctggaaatcaaagaacgaacaaacgagctgatcaggccgccgatttcaaatgtcgatcaggccgttcttgtcttttctgccgttcagccggcgttcagcacgtctttattggaccgttttctcgtccttgtggaagccaacggcattcacccgatcatctgcataaccaaaatggacttagctgcagaaggggaatcgaaagaggcgatactttcttacgtgaaagactatcaggcgatcggttatgacgtatatgtgacgtcatcaaaagaaaacagcggcttaacaggcattgtgaaacacttcgagaacaaaacaacggtgtttgccggtcagtccggagtcggaaaatcttcgcttttaaatgcgatcagcccggagcttgagctgaaaacaaacgagatttccacgcatttgggacgcggaaaacatacgacgcgccatgtggagctcattcatacatcaggcggtctggttgcggatactccggggttcagttcgcttgaatttaccggcattgaggaagaagagctgggcagcacgttccctgagatcagagaaataagcgcctcttgcaaattcagaggctgtctgcatcttaaagagccgaaatgcgcggtaaagcaagcggtggaagaaggagagattcagccgtaccgctatgagcattacaaagaatttatgcaggaaataaaagagagaaagccgaggtattaatatgattaaggttgcgccatcaattctttccgccgattttgcttcactgggcgaggaaattaaagacgtggaaaaaggaggggcggactatatccatattgatgtcatggatggccatttcgtccctaacattacaatcgggccgcttatcgttgaagccgtccgtccggtgactgatctgccgctggatgtccatcttatgattgaaaacccggaccgctacatcccggcattcgcaaaagccggtgcggacatcctttccgttcatgctgaggcgtgtccgcatcttcaccggaccattcaattgataaaagagcagggagtaaaagcgggagttgtgctcaatccgcatacgcccgtccaaatgattgaacatgtgatcgaggagcttgaccttgtgctgttaatgacggttaaccccggttttggcggacagcgcttcattcattcggttctgccgaaaatccgtcaggtcaaacagctggctgaggagaaaggcctgtctgagcttttaatcgaagtggacggaggcgttaataaagaaacagcccctttatgcactgaagcgggcgccaatctgcttgttgccgggtctgccgtatataatcagccggatcggaaaaaagccatcgctgacatccgaaacgcgtaataaacatgctgaaaaagagcccggtgaaagccgccggctcttttcgcgtctaagagagaggaaaacatatgaagacaatcaatatcgttgcgggcggcccgcgggaacttattcccgatttatccgaatacacagacggagatacaacgtgggtcggagtcgataaagggacggttgctcttttggaagccggaatcattccgcaggaagctttcggtgattttgacagcattacggaagaggagctcatgcagattcaaaaagcggcgccggccctccatgtgtatcaggcggaaaaagattataccgatcttgaactcgcccttgactgggctttacaaaaagaaccggaaaccattcggatattcggtgtgacgggcggaagagccgatcattttttagggaacatccagctgctgtataaagccttacataagaataccgatgtcgagctgatcgaccggcagaatgacattcagatgttcgggcccggccgttatacaattgaagaaaaagcgcgcagacgctatatttctttcattccgtttacggaagcggcagacggcctgacactcgacggttttaaatatccccttgataattgtcatattcctctgggttccacactatgtattagtaacgaactcattcattcacgaggtactttttcgtttgcaaaaggcatattaataatggtaaggagcgcggattagaaaagcggcttctgccatatgcggaaaaaaccatgaatcctaaagtgatgaacgcagcggatacgggacttataggaggggacaaaatgaaattttataccattaaattgccgaagtttttaggaggaattgtccgggcgatgctgggctcatttagaaaagagtaagcccaagaagctgaaattgccctctttgaacgcataaaaaacgcctgccgcataaaagggcaggcgttcatttttgcttatacacgctcaactttaccggattttaaagcccgggcagatacatacacttttttaggtttgccgtcaacaaggatgcggaccttttgaaggttggcgccccaagtacgcttagaagcgttcattgcgtgagaacggttgtttccggcttttgtttttttacctgtaataaaacatttacgtgccatttgtttccctcctaactgcgcgaaacatcttttcaaacatagtgtctcagatgctttcgttatacaatactttaaataatttaccacagctaaaaaccgtttgcaactattgtttcccttactttcaagaaaaatcacttgacatgtaaaaccaatcacatttccgcgctgaaggccgctgtctgtatcttttcttttcataatgggatacatatagtagaataatgataactctatgcatctgaaggaggaacctgtgtgtccattgaaatgaagacaaaatacggacagattgatatatccaacgaagtcatcgcaatggttgccggaggcgctgccattgactgttacggaatagtggggatggcctcaaaaaaccagattaaagacggtttgtctgaaatcctccggagagagaacttcgcaaaaggcgtacatgtccgtcaggaagccgaacaaatacatatcgacatgtacattattgtcagctacggcactaaaatatccgaagtagcccacaatgttcagacgaaggtaaaatacacagtaaatcaaacaatcggacttgcagttgattctgtaaatatttatgtccaaggcgtacgagtaacgaacccgtagtgaggaggatgagtattgtctagacgaaacttagatgggagagcttttgcggcaatgattctggcgggggctgagacattgtctcaaaacgcgtccgcggtggatgcgctgaacgtgtttcccgtgcctgacggcgataccggaacaaatatgaatttatcgatgtcatccggtgcaagagaggtagagcacattgactcacccgacatcggcaaagtcggcatcgccttgtcaaaaggcctgcttatgggagcgagaggaaactcaggggtgatcttgtcccaattgttcagaggtttcacaaagagcattgaaaacaaaaatcaaatagacgcccaagaatttgccgcagcactccaagcgggagtggatatggcatataaggcggtcatgaaaccggttgaaggaacgattttaaccgtggccaaggatgcggctaaaaaagcggtcgcctcggccaaagaagaaaccgatattatttcggtcatggaggccgttattgaagaagcggaagcgtcgctgaaccgcacgccggatctgcttcctgttttaaaggacgtcggtgtcgttgacagcggcggaaaaggtctgctttgtgtatatgaaggctttttggctgctttaaaaggagaggccgtaccgaaaaaagcggttcttccggcactcgatgatatggtgaatgccgagcatcataaaagcgcgcagagcatgctgagtacagaagacattgaattcggattttgtacggaagtgatggtgaggctggatcaagataaacggacgttcaaggaagagacgttcagaaacgaactgagccgtttcggcgattcattgctggtcgtggctgatgatacgcttgcgaaagttcatattcatgccgaagaaccagggaacgtactcaatctcgcacagcgttacggcgatttgattaaaattaaaattgaaaacatgagggaacagcatacttcaatcatcagccaagaacatgatgaaaaaaagccggccggcgttatgaaagaagcccgcaagccttttggcatcgtgactgtggcaatgggagagggcatttctgaattgtttacgagcatcggcgcttcacacgtaatcgaaggcggccagacaatgaatccgagcacggaagatattgttgaagccgttcagtctgtcaatgcggagacggttttcattcttccgaacaattccaatattgtgatggctgccaatcaggcggcgagcgtggctgaagaaaatgtcattgtcattccggcaaaaacggtccctcaaggcatgactgccctgcttgcgtttaaccctgaccagccggctgacgtaaatgaagctaatatgcttgaggccatccggaatgtgaaaagcggacaggtgacatattcagtcagagacacccatatcgacggcaaagatattaaaaaaggtgattttatcggcattttaaacagttcaattatcggcagcgccgaagatcggataagtgcggcgaaactgctgctggatgaaatgatcggggatgaagatgaaatcgtcaccattttgtacggagaggacgcgacggaagaagaagctgagaaactcgctgagtatattgcaagcgtctgtgaagatatcgaggttgaaatccataacggcagacagcctctgtatccatatatatttgcggcagaatagaagggcttatcaggcccttctattcttatgcctttatttacctgcggcagtgcggcagtgtgcctgcttgccaattgagaaatgttcaattagtctaaagaaaagcgctgaatgaagtgatgttaaggaggagcaaaccagcatgaagtatagaagcgtttttgatattatcggcccggtaatgatcggtccgtccagttcacataccgcaggcgccgcccggatcggcagagtggccagaagcttattcaggcgggagccccgccgaatcgttgtgtctttttacggatcatttgcggagacgtataagggtcacggcactgatgtcgcgattatcggcggcctgcttgattttgatacatttgatgagcggattaaaacagcgattcaaattgcggaagagaagggcatatatgtagagttccgtacagaggatgccgtgcccgttcatccgaatacagcgcgcatcgtcatttctgatgatgagggagagcttgcccttaccggtatttccatcggcggcggaaaaatagaaatcacggagctcaacggctttgagctgcgtttgtccggaaaccatccggctattttagtcgttcacaatgataaattcggcacgattgcaggcgttgccaatgtgcttgcgaaattctccatcaatgtcggacatatggaagtggcgcgtaaggacgtcggccagcttgcgctgatgacgattgaggtcgatcagaatattgaagaagaagtgcttgacgagctttcaacacttcctaatattatacaggttactaagatagctgactaaaaagtcaggaggaaaatgacatgtttcgtaatgtaaaagaattaatagaaatcactcaagaaaaacaaattccgatttcggaagtgatgatcacccaagagatggaagtgacgcaaaaaacgcgggaagaaatctttcaaggaatggagcgcaatctctccgtcatggaagcagctgttgaaaaagggctgaagggcgtcacgagtcagaccggtttaacaggcggagatgccgtgaaacttcaggcatacatccaatctggaagaagcctgtcgggcaatctgattttagacgccgtttctaaagctgtggcgacaaatgaagtcaatgcggcgatgggaacgatctgcgctacaccgactgccggctctgccggggtcgtgccgggaacgttattcgccgtaaagcataagctgcaccctacgacagaacaaatgatccgttttctgtttacagccggcgcgttcggttttgtcgtagcaaataatgcgagtatttcaggagcggcaggaggctgtcaggcggaagtcgggtcagcatcaggcatggcagcggctgcgattgtggaaatggcgggcggaacgcctcagcaatcagcggaagcaatggcgattacactgaaaaatatgctcggtctcgtatgtgacccggtcgccggattggtagaagtgccgtgtgtcaaacgaaacgcaatgggagcatccaacgcaatgatcgcggcggatatggcgctggccgggattacaagccgcattccttgcgatgaggtgattgacgcgatgtacaaaatcggccagacaatgccgacagcactgcgtgaaacgggacaaggcggtttagccgcgacaccgacgggaagagaattagagaaaaaaattttcggaggagcgctgaaatcaagtgacacaccatcagcaaactagtatagcggaaattaagggcattgggccggaaacagaaaaaacattgcacgaacttggtatctatgacatttctgatcttctgaattatttcccttaccgttatgatgactatgagctgagggatttagaagaagtaaaacatgaagaaagagtgacggtagaagggaaggttcattcagaaccttctcttacctattacggcaaaaaacgaaacaggctgacattcagagtgcttgtcggcaattatttaattaccgcggtctgctttaaccgtccctacttaaaaaagaaactgacgttaggttctgtcgtcacgatatcagggaaatgggataaacacagacagaccgtttccgtgcaggaattaaaaaacggtcctcatcaagaagataaaagcattgagcctgtttattccgttaaagaaaacgtcaccgtaaaaatgatgagacggtttattaaggaagcgctgcagcatcatttggacagtgcggccgatccgcttcctgaaaaattgagaatccgctacaagctgcctgattacaaacatgccctgcagacgatgcatcagcctgaaacgagggaatcgttacagcaggcaagacgccggtttgtttacgaggaattcttattatttcagctgaaaatgcaggcgttccgtaaagcggaaagggaacagtcaaaaggcatcagccatgtgtttcctgctgaaaaactcgccgctttcacaaacagcctgccgttttcgctcacgaccgcacagacgcgcgtgcttcgggaaattaccgctgatatgacatccccttaccgaatgaaccgtctgctgcaaggtgatgtcggttcagggaaaacggccgtcgccgccatcgctttgtatgctgcgattttgtcggggtatcagggggcattaatggtgccgactgaaattttggccgaacagcatgcagattctctcgtatcgttgtttgcaaatgaagatgtaaatatcgcgcttttgacgagttctgtcaaaggaaagcggcgcagggagcttttggagcggcttgctctcggagagattgatattttagtagggacccatgctttaatccaggatgaagtggagttcaaagcgctgagccttgttattacggacgagcagcaccggttcggggtcgaacagcgcaaaaaactcaagaataaaggtcaggatccggatgtgctgtttatgacagctactccgattccgagaacgctggccattaccgtcttcggagaaatggatgtttccgtgatagatgaaatgcccgcggggcgaaaacaaatcgaaacgtattgggtgaaacacgacatgctggagcggattttggcttttatagaaaaagagctgaagcagggaaggcaagcctatgttatctgcccgctcattgaagagtcggataaactggatgtacagaatgcgattgacgtatataacatgctgtctgacgtttaccgcggtaaatggaatgtcggcctgatgcacgggaagctccattctgatgaaaaagatcaggtgatgagagaattcagcgccaatcaatgtcaggtacttgtgtcaacaaccgtcgtagaagtcggcgtgaacgtgccgaatgcgacgattatggtcatctatgacgccgaccgtttcgggttatctcagctccatcagctccgcggccgggtcgggcggggagaccaccaatctttctgcatcttgatggcagatccgaaatccgaaaccgggaaggaacggatgagaatcatgtcggagacaaacgacggcttcgaactgtctgaaaaggaccttgaactgcgcggccccggtgatttcttcggaaaaaaacagagcggtatgcccgagttcaaggtggcggatatggttcatgactacagagctttggaaacggcccgccaggatgcggccaatctggtgtcttcagaggcgttttggaaagatgacgaataccgcatgctgcgcggtcaattactttcaagcggcgtcctggaaggggagaaattaagctgattctgcaaaattcggcggctttcaaaaaacaatcattgcattccaatctatgagattatatactactattagtacctagtcttaattgtccggatggtgtttacagatgagaagaagcaagaaagaacgccaaaaattattgcagcagacgatcaaatcgacacccttcatcacagatgaagaattagcggggaaattcggcgtcagcattcagacgatccgtttagaccgcttagagctctcaataccggagctgagggaaagaattaaaaacgtggcagaacaaacgcttgatgatgaagtgaaatcactgtctttagacgaagtgatcggtgaaattattgatctggagcttgacggccaggccatttccatattagaagtaagacgcgagcatgtcttcagccgcaatcaaattgcgcgggggcatcatttgtttgcgcaggcgaactcactcgccgtagccgtcattgatgatgagctggcgctgaccgcaagcgcaaatatccgctttacaagacaggtgaaagaaggcgagcgcgtcgttgcgaaagccaaagtgacggcagtcgaaaaagaaaaaggcagaacggtagttgaagtcaacagctatgtgggagaagaagtcgtgttctccggcagctttgacatgtaccgttcaaaacaatcataaaggtggagcatgcatgagaatagctgtagatgcaatgggaggcgacaacgcacccaaagctgttattgacggagtaatgaagagtattgaggcatttgacgatcttcatattacgctggtcggtgacaagacaacgatagaatcacacttgccaacaacatcagaccgcatcactgtgttgcacgccgatgaagtgattgaaccgacggatgaaccggtccgcgccgtacgcagaaagaaaaactcttctatggtgctgatggcgcaggaagtggctgaaaacagagcggacgcctgcatctcagcggggaatacgggtgcactcatgacagcgggactgtttatcgtcggcagaattaaaggaatcgaccggcctgcgcttgcgccgacgcttccgaccgtttcaggcgacggtttccttcttttggacgtgggagccaatgtcgatgccaaaccggagcatctcgtccagtacggaattatgggatctgtatatgcccggcaggttctcggaatcagctcgccccgcgtcggattgttaaatgtcggcacggaagaaaagaaaggaaacgacctgacaaaaaagacgtttgaactattaaaagaaacaaacgtgaattttgtcggaaacgttgaggcgagagacttgctcgaaggcgctgctgacgtcatcgtcacagacggctttacgggcaacgtcacgttgaaaacattggaaggttcagcgttatcgattttcaaaatgctgaaagatacactgacttcaagttttgtttctaagctcgcagctggagtgctgaagccgaagctgatggaaatgaaactgaaaatggactattctgagtacggcggggcgagtcttttcggtttgaaagcgcccgtcgttaaagcgcacggctcttctgacgcacgcgctgtttaccatgcgctgcgccaggcgagagaaatggtcagccaaaacgtggccgcatttatagaagaagaagtaaaagaagaaaaaacagatgagtagtctggaggttaccgcatcatgagtaagattgcatttttatttcccggacagggatcacaatatatcggtatgggaaaagacctgtacgaacgcgaagaagcgtcaaaacgtatttttgatgaagcggatgaaacgcttgaaacaaagctgagctcgctcatttttgaaggtgacgccgaagaattaacccttacatacaatgcgcagcctgcactgttgacaacgagcatcgccgtattggaaaagtttaaagaatccggtatcacccctgatttcaccgccggccacagcctcggagaatattcggcgcttgttgcggcgggagcgatgacatttaaagatgccgtttacacggtaagaaaacggggagaattcatgaatgaagccgtgccggccggagaaggcgccatggccgctattctcggcatggatgcggagtcattgaaaaaggtgacggatcaagtgacggaaaacggtcatctcgtacagcttgcaaacttgaactgccccggccagatcgtaatttccggaacggcaaaaggtgtggagctggcttcagaggaagcgaaaaacaacggagcaaaacgggcaatcccattagaagtaagcggaccgttccattctgaattaatgaagccggcagcgcaaaaactcgaggaggtgctcagcgcctgtgagttaaaaaatgcggctgttcccgtgatttcaaacgtttcggctgacgttatgacagaaaaagacgatatcaagaaaaaactgatcgaacagctgtactcacctgttcgctttgaagaaaccattaacaaactgattgacgaaggcgtcacgacgtttgttgaaatcgggccgggaaaagtgctttcaggccttgtgaaaaaagtgaaccgccgccttaaaacaatcgcggtttctgaccatgaaaccatcgaactggcgattcaaacgctgaaggaggagaatcaggatgcttaatgaaaaaacagcagtggtaacgggagcgtctcgcggaatcgggcgggcgatcgcgcttgatcttgcgaaaaacggctgtaacgtagtagtcaactactccgggaatgaagcgaaagcgaacgaagtcgtagatgaaatcaaatctttgggccgaaacgcgatcgcggtaaaagccgatgtatcaaattccgaagaagtacaaaacatgatgaaagaggctgtcgctgcattttcttcaatcgacattctcgtgaacaatgcggggatcacaaaagacaatcttctgatgagaatgaaagaaaatgaatgggatgatgtcattaacattaacctaaaaggtgtattcaactgcacgaaagccgtgacaagacagatgatgaaacagcggtccggccggattatcaacgtatcatcaatcgtcggcgtcagcggaaaccccggccaggcaaactacgtggcggcaaaagccggtgtaatcggcttaacgaagtcatcagccaaagagcttgcgagccgaaatattacggtcaatgccattgctccgggctttatttccacggatatgacggacaagctttctaaagaagtccaagatgaaatgctgaagcagattccgctcgcgcgtttcggtgatccttccgatatcagcagcgttgttacgttccttgcttctgaaggatcgcgttatatgacgggccaaacccttcatattgacggcggaatggtgatgtaaagatttgtttttaaaatttcatcctagtttctctagttttttaaaaacgaatcctctataatacttgaggggaggtgaattgctatggcagatacattagagcgtgtaacgaaaatcatcgtagaccgccttggcgttgatgaagctgacgtcaaacttgaagcttctttcaaggaagacttaggtgctgattccctagatgtagttgagcttgttatggaacttgaagacgagtttgatatggagatttctgacgaagatgctgaaaagattgcaacagtcggcgacgctgtgaactacatacaaaaccagcaataagctgatgctaaaagtcccgcctgacagcggggctttagccctttaatcgttcggttaccggcgtctgacgctgtacgcgctgccgatcccgtttacggcggggagcgcggtgaacctgatgtgcctatggaggttactatgtcaaaacactcacattttaaagataaaaaaaagttctataaaaaaatagagcaatttaaagagttccaagaacggatttcggttcattttcaaaacgagaaacttttgtatcaagcatttacacattcatcttatgtgaatgagcatcggaaaaagccgtatgaagacaatgaaaggcttgaatttttaggtgacgctgttttggaactgacgatctcccaattcttatttgccaaatatccggccatgagtgaaggagatttgacgaagctgagagccgctatcgtatgcgagccgtcactcgtctcacttgcccatgaattgtcattcggcgatcttgttctcttgggaaaaggagaagaaatgacgggcggcagaaagcgtcctgcgcttttagcggatgtgtttgaagcgtttatcggcgcactgtatctggatcagggccttgacccggttcagcaattcctgaaagtgtacgtgttccctaaaataaacgatggtgctttttctcatgtgatggatttcaaaagccagcttcaagaatttgtacagcgggacggaaaaggatcgcttgagtacaaaattctcaatgaaaaagggcctgcccacaaccgggaattcgaggcgcttgtctctcttaaaggtgaggcgctcggtatcgggaacggacgttccaaaaaagaagccgagcagcatgcggcacaggaagctcttgcgaaaatgcaaaaacatcatacgaaacaataaaatccccctgtttccctagggggatttcagtatgtctgcgcctgatataagcgggtgattatgataatattgagatacttatacgataaggaggatctgggatgttcctcaaacgtttagacgttataggatttaaatcatttgcagaacggatatccgttgactttgtaaaaggcgtcacggccgttgtcggtccgaacggcagcggaaagagcaacattaccgaagccatccgctgggtgctcggcgaacaatcagcccgctcgcttcggggcggaaaaatggaagatatcatttttgcgggaagtgattcgcgcaagcggctgaaccttgccgaagtcacgttaacgcttgataatgaagatcattttctcccgatcgattaccacgaagtcagcgtgacgagacgggtgtaccgttccggagagagtgaatttctcatcaacaatcagcagtgccgtttgaaagacatcattgacttatttatggactccgggctcggaaaagaagcattctctattatcagccaggggaaagtcgaagagattctcagcagcaaagcggaagaccgccgcagtatttttgaagaagcggccggcgtgctgaaatataaaacaagaaagaaaaaagcggaaaacaagctgtttgagacgcaggataacttaaacagggtggaagatattctccatgagcttgaagatcaggtcgaaccgctgaaaatccaggcatcaatcgccaaagactacttagaaaaaaagaaagagcttgagcatgtcgaaattgcccttaccgcctttgacatcgaacaactgcatggcagatggtcgggtttaaaagacaaggtgcaggctgctaaagaagaagaattggcggaatcatcggctctatccgcaaaagaagcgatgatagaagagacgagagataaaatccacgcgcttgatgaatccgtcaacgaactgcagcaggttctgctcgtgacaagtgaagagctggaaaagctggaaggccggaaagaagtgctgaaagagcgcaaaaaaaatgccgcgcaaaaccgggaacagcttgaggaatccgttacacattacacgaacaaagaagccgaactgaaagccgacattgaaaaacagtctgccgtctatgataagctgcgtgcggaagtgaagcggttaaacgcccaagtgaaagaaaagcagcaggctctcagtctgcataatgaaaatgtagaagagaaaattgaacaattaaaaagcgattactttgaattgttaaacagccaggcgtcgattcgcaacgagctgcagcttttagatgaccagatgtcccaatctgcggtccagcaggcgagactgaccgcaaacaatgaaaaatatcttgaagaacgtaacgatattgcagtccgcaaagcgacgtgcgaagaagaattggctgccgttgaagaggatattcacaatcaggtcgtccgctttcgcgaagtccagacagcatatgaacagaaaaaacgccaatatgaaaagaaagaatctgcgctgtatcaggcatatcaattcgtccagcaggccagatccaaaaaagatatgcttgaaacgatgcaaggcgatttttcaggattttaccaaggcgtaaaagaagtgctgaagcagaaagagaagctcggcggcatccgcggcgccgttctcgaactgattgccaccgaacaaaagtatgaaacggcgatcgagattgcactcggcgcagcggcgcagcacgttgtcacagacgacgagcaggcggcgcggaaagcgattcaatatttaaaacagaattccttcggccgcgcgacgttcctgccgcttacggttatgaaaccgcgccagctccaaacccgtgatgaacagacggctcagaagcatccgtctttcctcggcacagcgagcgggcttgtcacatatgatgccgcgtatcggaatgtcattcaaaaccttctcggcaccgtgctgatcactgaagatttaaaaggtgcgaatgaactggccaagcttctcgggcaccgctaccgcatcgtgacgcttgagggcgatgtcgtcaatccaggcggatcaatgacaggcggcgcggtcaaaaagaaaaacaattctctgctcggcagaagccgtgagcttgagacggtgactgcgcggcttgccgaaatggaagaaaaaacagctttgctcgaaaaagaggtcaaaacgctgaagcaggccattcaagagcttgaacatacgctgagcggtctccgtgaagacggtgaagctttcagaacaaagcagcaggatgtaaaaggcaggctgtatgaactcgaagtcgctgaaaagaacatcaatacccatctggagctttacgatcaggagaaagcatcactgaccgaaagcagccgggaaaaagagacgcgcaaatcagctctggaagaacagctgagtgaggcatccggccagctgaaagagcttgaggaagagatggaaaggctgacaaaacaaaagcagaccctatcctcaacaaaagaaacgctctctcatgaactgacggaatgtaaagtggctgctgcgaaaaaagaacaggcgtgttcgagtgaagaagacaacctcaaacggctgaaaaaagagcttgaagaaacgcagctcgctctgaaagaaacacgggaagatttaagcctcctgacctcagagatgacgtccagcacaagcggtgaggagcagcttgaaaaagcagcccatcacaagcttcacgataaaacgagaacgatcgaattgatcgccagccggcgcgaccagcgggtgaagctccagcgggctcttgatacgaacgagcttgaactgaaagagatgaagcgtctgtataagcaaaaaacagacattctgaaagatgaagaggtaaaactcggccggatggaagttgagcttgataatctcttgcagtatttacgcgaggaatacagcttatcctttgaaggggcaaaagaacaatatcagctcgaactcgagcctgaagaggcgagaaaacgggtcaaactgatcaagctttcaattgaagagctcggaacggtcaatctcggcagcatcgatgaatttgaaagagtaaacgaacggtatcagtttttaacagagcagaaaaatgacctgacggaagcgaaaaacacactgtttcaagtcattgaagaaatggattctgaaatgacgaagcgattccatgaaacgtttatccagatccgttctcaattcaacgacgtgttccgttctttattcggaggaggacgggctgaactgaagctgactgatccgaatgatcttcttaactccggggtggacattatcgcgcagcctccgggcaaaaaactgcaaaacttaaatcttttgtcagggggagaacgggcgctgactgccattgcccttttattctccattctgaaagtaaggcccgtgccgttctgcgtccttgatgaagtggaagctgcgcttgatgaagccaatgtattcaggtttgcgcaatatttaaaaaaatacagcggcgacagccagtttatcgtcatcacccacagaaaaggcaccatggaagaagcggatgtcctctacggtgttacgatgcaggaatccggcgtttcccgaatggtttcggtcaaactggaagaaacaaaagaattcgttcagtaacgaggaaagaggttgaaagatgagcttttttaaaaaattaaaagagaaaatcacgaaacagacagactccgtctctgaaaaatttaaagatggtcttgaaaaaacaagaaattccttctcaaataaagtgaacgaactcgtctcccgctaccgaaaagtcgacgaggatttcttcgaggagcttgaggaagtgctgattggcgctgacgtaggttttacaaccgttatggagctgattgatgagctcaaaaaagaagtgaagctgaaaaacatccaggatcctcaggaagtgcagtccgtcatttctgaaaagcttgtcgacatttataacagcggcgacgaacagatttctgaattaaatattcaggaggggcgcctgaacgttattctgcttgtcggggtaaacggcgtcggaaaaacgacaacgatcggaaaacttgcccataagctgaagaatgaaggcaaatccgttgtgctcgctgccggagacaccttcagagccggggcgattgaacagcttgaagtgtggggggagcgtacaggcgtgcctgtcattaaacaggctgccggaagcgaccctgctgcggttatttatgatgccgtacacgcggctaaagcaagaggagcggatgtgctgatttgtgatacggccggccgccttcagaataaagtaaacttaatgaaagagcttgaaaaagtcaaacgcgtcatcgaacgcgaagtgcctgaggctccgcatgaggttctccttgcgctggacgcgacgacaggccaaaatgcgatggcgcaggcgaaagaattctccaaagcgacgaatgtgacgggtatcgcgttaacgaagcttgacggcaccgcaaaaggcggtatcgtcctggcgatccgcaatgagcttcacatccccgtgaaactggtcggcctcggagaaaaggttgacgatctccagcggtttgatgcagaatcttacgtatacggtctcttttctgatttagttgaaaaagccgaggattaatgaataaaaaacgagtataaaatggacggttttatactcgtttttttatacgcattgatagatcggaatggagggggcaattgttggacaaatggctgaaagctgaattggaaagtaaggtcggagcgataaaccatatgtcgctgctggatgaacagggaggcacttcaaccgttcgaaaaatagtggccggccaagacgcatttctgctgaaaagttcttttcaacagaagtatcgggaatggttaatgagagaagccttcgttttacaaaaactgacggaaactcgtcgtctgcctgttcctatttattatgggatgatacaggaacagcatgccagccatatcatcatgtcatttgaggatggaatcaccctgacttcggctttaagaaaagcaaaaggggatactgaaaagaaaaagctgatcaaaagtttcggccagtttctgcaacgtctgcatgaaaccgaaatggtccctggtttacagccggaatcagactggctcgatctgcaaatcaaacgagccggggaatatgtcaaaaaaggacaggctgaaggaagtgcagagcttttgaaggaattggacaggtacaggcctgttcctgttcagcagacaatgatacacggtgactgcacgactgataatgtgctggtgaaagacggagaggtctatctgtttatcgatgctgcgggaatatcggcgggagatccgcgatatgatgaatcattagcgatcagtcattttgtcacaaatgaagcatgcctcaatgctttttacgaaggctattgccgctatcgtgtatcaaaacaagaattcgagtattttaacgacggtctatatgaatttttttgaaaaaacttattatgtaaaaagagcatcatgctttgacaagataaaaacttgacacacgctctgaaaccatgtaaactaagtttttgtaaagggatttgacttaacaaaggggagagctcaaatgtcgctcgaaaaaacgacgagaatgaactatttatttgacttctatcagtcgttgctgacgtcaaaacaaaagagctatatgtcgctttattatctggacgatttctcccttggtgaaatagccgaagagtatgacgtttcaaggcaagccgtttacgataacatcaaacggactgaagcgatgcttgaacaatatgaagaaaaactgctcctttttaaaaagtttcaggagcgtaaagaaatgtttacaaagctgaaagagcttgcttccgggttgcaggaagaggaaaaaatgacggctctgattgaagcgcttgagaaattagattaggaggcggcaaacaatggcatttgaaggattagccgaccgactgcaaaagacgatttcaaaaatccgcggaaaaggaaaagtcagcgaacaagacgtaaaagagatgatgcgtgaagttcgtcttgcgcttcttgaggctgacgttaactttaaagtcgtaaaggattttgtgaaaaaagtaagtgaacgggctgtcggacaggacgttatgcagagtctgacacccggtcagcaggttattaaagtcgtaaaagaagagcttaccgagctgatgggcggcgaagaaagcaaaattgccgtcgccaaacgcccgccgaccgttattatgatggtcgggctccaaggtgccggtaaaacgacaaccacggggaagcttgccaacctgctgcgcaaaaaacataaccgcaaaccgctgctcgtggctgcggatatttaccgccccgccgcgattaaacagctggaaaccctggggaaacagcttgatatgccggtcttttcgcttggcgatcaggtcagcccagtggaaattgccagacaggcgattgaaaaagcgaaggaagagcatcatgattatgtgattttagacaccgccggacggctgcacatcgatcatgaactgatggatgagctctccggcgtaaaggaagtcgcaaatcctgaggaaattttccttgtcgtcgactcaatgaccggtcaggatgcggtaaacgtcgccaaaagctttaatgaccagctcggtttaacgggtgtcattttaacaaagcttgacggggatacccgcggaggtgcggcgctttctatccgcgcggtcaccgaaacgccgattaaattcgccggaatgggagaaaagctcgatgctcttgaagcgttccatcctgaacggatggcatcccggattctcggaatgggtgacgtgctgaccttgattgaaaaagctcaggcgactgttgatgaagacaaagccaaagagcttgagcagaaaatgagaacgatgagcttcacattggatgattttctggagcagctcggccaggtccgaaacatggggcctcttgacgaactgctgcaaatgatgcccggcgcaggcaaaatgaaaggcttaaaaaacatccaagtcgatgaaaaacagctgaatcatgtggaagcgatcattaaatcaatgactgttcttgaaaaagaacagccggatgtcattaacgccagccggcggaagcggattgccaaaggaagcggaacatccgttcaggaagtcaaccgtcttttaaagcagtttgaggaaatgaaaaaaatgatgaagcagatgaccaacatgacaaaagggaagaaaaaaggctttaaattaccttttatgtaatcggttatacatgataaaaccgttgttaagaaaaaacactttacaaacacttttatcattgttaatatactatcttgttgaaatattttcggaggtgctagtaaaatggcagtaaaaattcgtttaaaacgtatgggagcaaaaaaatctcctttctatcgtattgttgtagcagattctcgttcaccgcgtgacggccgtttcatcgaaacagtcggcacatacaacccggttgcaaagccggctgaagtgaaaatcaacgaagagcttgctcttaaatggcttcaaacaggagctaaaccttctgatacagtccgcaacttgttctcaagccaaggaattatggaaaaattccacaacgctaaacaaggcaagtaatgactgatcagaacttggaagatttgattgtcagcattgtggctccgcttgtcgaccatccggaagacataacggtcacaaaggaagagactgatcaaaagattgcgctgcgcttatctgtcaataagtcagataccggtaagattatcggaaagcaaggccggactgcaagagcgattcgaaccgtcgtttttgcagctggcgcacagtcttctaagaaagttcaatttgaaatatttgactgaaaaagggagagggccggcacctcccctttttttacacgtaaaaaaggcaaatgaacagaaatatgttggaagagtggggagtctggtcctatgcagattattcacagggtaaccgttatgcaggttctgaccgagcaaagcaaggaaaagcttttggcctcttttgcagaaaaaaagcaaacgcttgaacgagaatgcagccagctctattttcagcttagaaaacatgaaaaagatcagcagaatcccgatgtagcggaatcttttaaaaaagccattgagaaaagacaagacaaaatcaaaatgatcgatttccaaataagccagacagagtcgctcccgcttggaagcgaagtgaaggaaaaggagatcgatgcgctgctttcaatcaatgtcggtgataactggcatgaaaaaacagcggcaaataccatcgtcataaaagacggggtagtaattgaaatccgcccgaggtgataatatgacaaacagatggtttaatgtaggcaaaattgtaaatacccacggcattaaaggcgaagtgcgggtcatttctaaaacggactttgccgaagaacggtacaagcccggcaatacgctctatttgtttgcggaaggggctgcggagccaatcaaagtaacggtaagcgcccacaggcttcacaagcagtttcacctgctgcaattcaaagaaatgccgagtctcaatgaagtcgaacacctaagaaacatggtgatcaaagtccctgaagaagacttgggagagcttgaagaagatgaattttattttcatgagatcatcggctgcgaggttgtgtcagaagacggggaactgatcggcacagtgaaggaaatcttgacgccaggggctaatgacgtatgggtggttgcaagaaaaggcaaaaaagatgcgctcattccgtatattgcttctgtggtaaaggatattaatataaatgagaagaaaattaagattcatgtaatggaagggttaatagacgaatgaaaatcgactttttaacactgtttcccgaaatgtttcaaggggtgctcggctcctccattctgcaaaaagcacaggaaaaagaggctgtccgttttgacgtcatcaatttccgggctttttcggataataaacaccaaacggttgatgattacccgtacggcgggggagccgggatggtgttaaagccgcagcctgtatttgatgcggttgaaaagctgacagccggtacggacgccaagccgcgcattattctcgtctgcccgcaaggtgagcgttatacgcagaagaaagccgaggagctggcacaagaggaacatctcatgtttatttgcggacattatgaagggtatgatgaacggatccgggaacatcttgtcactgatgaaatctccatcggggattttgtgctgaccgggggagagctccctgccatgatgattgccgacagcgttgtcaggcttttgccgggcgtcctcggaaaagaagcatcccacgtggaggattccttcagcacggggcttttagagcatccgcactatacgaggcctgcagattatagaggcttaaaagtgcctgagacccttttgtcgggcaaccatgccaaaatacaagaatggcgcaataaagaatcaatcagaagaacctttttaagacgtcccgatcttcttgaaaactatcctctcactgatgagcaaagaaaatggatttccgagtgggaaaacgaatagattctattgcgcaggcgatgaagatatgataagatactacttgtggcttaaggaggcttatccttcagaagcttgaaaacgatgttccgctgtgccttgcagttgtggccaagagcatctgttggaaggagttgaaaacgatgcaaaaactaattcaagatatcacaaaagaacagcttcgcactgatcttcctgcgttccgtcctggtgacactttacgtgtacacgtaaaagttgttgagggtaaccgtgagcgtatccagatcttcgaaggtgttgtgatcaagcgtcgtggtggtggaatcagcgaaacgttcacagttcgtaagatttcttacggtgttggcgttgaacgtacattccctgtacacacaccaaaaatcgcgaaaatcgaagttgtacgttacggtaaagtacgtcgcgctaagctttactacctgcgtgaacttcgcggaaaagcggctcgtattaaagaaatcagacgataatgataacgaacgaaaagagcttgttacccgtaacaggctctttttttatatgaaatttgtaaaagcagaacaagcaacgtaaaatacataagagatcatcggaacatccggttccggtaaataaggcaggtgtcgaagtcacatgaccattcaatggttcccaggccatatggctaaagcgagacgggaagtaacagaaaaactgaaattaattgatatcgtatacgaattggtggatgcgagaatcccgatgtcatcgagaaatccgatgattgaggagattttaaaaaataagccgcgcattatgcttttaaataaagccgataaggcggatgcggctgtgactgcccagtggaaggaccactttcaggaacagggcattccctctctttcaataaactccgttaacgggcagggactgcatcaaatcgtgccgtcctcaaaagagctgctgaaagataagttcgataaaatgaaagcaaaaggtgttaggccaagagcaatccgcgcattaatcatcggcattccgaatgtcggcaagtctacgctcattaaccggctggccaaaaaaaacattgccaagacgggagacaggcccggcattaccacttcacagcagtgggtaaaggtaggcaaggaattagagctgctcgatacaccgggaattttatggcctaaatttgaagatgagcttgtcggcttgcgtctggcgatcaccggggcgattaaagatacgattatcaacctgcaggatgtggccgtcttcgggctgcgctttctggaagagcattatcccgaccgcttgaaggagcgctacggacttcaggaaatccctgaggatatcgccgctcttttcgacgcgatcggtgaaaaacgcggctgtttgatgggcggcggaatggttgactatgataaaacaacggaagtcatcattcgggacatccggacggaaaaattcggcaggctttcatttgaaacaccatcagaataaagacgcgcagcgatgcgggtctttattttttccgcagaataccgatatacataatgtaagggagaagagaacgtgaatacattaaccgtaaaaagcgtaaaagaacgcctgcaagaggtcagggacgaaagcgaccccttccttgcccaatgtgagaaagacccgagaaaaagcgtacagacgcttttagagcaatggctgaaaaagcacgcgaaggaaaaagctcttaaagagcaatggctgaacatgacggcatacgaaagactgtcatccaaaaagggcttccgcctgattgcgggtgttgacgaagccggaagagggccgcttgccggaccggttgtcgccggcgccgtcattttgccggcagaatgcgagattctcggtctcacggactcgaagaaattgtctgaaaagaagctcgaggagtattacagccggatcacggaagaagcggcggctgtaggagtcggcattgtccatgcggacgtcattgaccggatcaacatttatgaggccgcgagactggcgatggtaaaagccgtcaatgctttaacggaaacacctgattatctgcttgttgatgccatgacccttccgcttgacattccgcagtcatcagttataaaaggggatgccaaaagcgtgtcaattgccgccggagcctgcatcgcaaaagtaacgcgggaccgtctcatggctgagtacgccaaaacctaccccctgtacggctttgaaaaaaataaaggctacggaacgaaagaacatcttgaagctcttcaggcatacggaccgacaactattcaccgaaaaacgttcgctcccgttcaatcttattgttagaaaagaggcttaagacatgaacataagcggcgaaatccaagcggctttcagacagctgacggcggaaatccctccggaccggcaagacggcggtaaagacagcggcgctcaaaggctgctgttagggaaggttctccgtttgctggacgatcaaagcgctcttatccaaatcggcggccggacgatgcagggaaaacttgaaaccccccttcgtccgcaggcgtattactggttttcttatgacaaacagccggcggaaaaaacgggccggcttcatgtaattgaccaattcgaaggaagcccgaaaaccgttcaggaagcggcgggaagactgttaaacgctctttctgtcaaaccaggccctgtgtctctgcagattgccgaaacgtttatgcagcagaagctgccgatgacggaaaacagcctcaaagcttgcatccgctgggctgaatcgtttccggccgccgaattgaaaaaagcggcggaaacaatcgtatttgcgctgaaacgggaactgcccgcacatccggaagtcttgtcagccattcatgctgttaaatatccggttccgacccggcgtctcctctcaggactgcttcaggcaatcaatcaggctccgcaatcggcaaaagagctgtctgtgctcaaagaggcggtttctgacgtgttaaacgcggaaacggatcttcatgcagaacgtctcctgaagaagcttgccgaggctgcacgcatgccgctctcagaaaccgggctgatggatgaaggagaacggacggaatcaaaacaatcaccatttgtccgagagactcgtgaaaacggaaaggcagtctcaagccagccttctcctccgagtgcacgcacacatccggaactgcctgaaaaaacggcaaaacagattatagagaaattaatgacatcggcagaaaaaactgaaaaccgtcccgtaaaagtaacggcggagatcattaaggctttcatttctcaagaaaaaacatttaaaacagcacctgttcttcaaaacgcacatctgacagaacaggaggcggctgtttttgaaaaagccgctcagctcaccgaattgaaatatgcagaaaaacatgatgtattaagccttttgcagaaaatcaaaaaaggactgggcacgcgtgatgaattatcattcattacagcgcttgaaaaaggcgtatctccgcagccggagaaacaagcgctgaaaacagccctccaagccgtccggacgcttcaagaggcgccccaatccgttaaacaagaggcggaaccgcttattcataaattaaacggccagctgtttattgagcagcataatccttcttttacgcagatggtgttgtcatttccgctgggagcgtccgcgtatgagaatgacatcacagttctctttaaaggacggaagaagccggacggaaaactcgacccgtcacattgcaggctcctgtttttgctgcatcttgaaacactgcaagaaaccgttgtggactgcatgattcagcaaaatgtaatgaccattacggttgagactgattttgagcttcaggcggccatcgaccctctcgtaccggctttaaaagaagctgtaaaagaaacgggcttcagcctgtcaggcgtcacggctaaaaaacggcgcccgaaagaccagagcgctcttgtggaagagtttatagaaaaagacggcggaagaaaagtggatgtgaaaatatgaaagagcaaacgccgttaagaagagctgtcgccctgcattacgaccggcagaaagaccaagccccgaaggttgtcgcaacaggcagggggcacgtggcggaaaatattataaaagaagctgagaaggctggggtccccattcaggaagaccgaacccttgtcgaattaatgcgccatttgacggttgacgatcagataccggaggcgctttatgaaaccgttgccgaaattttttcatttgtttacagactggacgaaaccctgaaaaacgaaaaataaggaccattcatttcccggactccgtttaaatttatattttcaataaaataaaagttagaatgtttggaaggatataaagattttgttttgaaccctagacaattcttccagtattatatagaatgaaagcgcagtctatttttagttttgctacataagttaggaggatgggaaatgaatatccatgagtaccagggaaaagaagtcctcagaaaatacggggtgtctgttcctgaaggtaaagtggcttttacagcagaggaagcagttgaaaaagcagagggcctgtcaagctcggtttatgtcgtaaaggcgcaaatccatgctggcggccgcggcaaagctggtggggtaaagattgcaaaaacaaaagatgaagtgaaagagtatgccgaagaactgttaggcaagacgctcgtcacacatcaaacgggtccggacggacaagtaataaaacgcttacttattgaagaaggctgcgatattaaaaaggaatactatgtcgggcttgtacttgaccgcgctacttcaagaatcgttttaatggcgtctgaagaaggcggaacggagattgaagaagtagcggaaaaaacacctgaaaaaattaaaaaagcggtaattgatccggctgtcggccttcagggctatcaggcaagggaaattgcattcgcaattaacatcccgaaagagcttgtcggcaaagccgctaaatttatgctcggtttatataaagcatttgttgagaaggactgctccatcgccgagatcaaccctctcgtcgttacgggggacggaaacgtcatggcgctggatgctaagctgaacttcgacagcaatgcgttatacagacaaaaagacattatggaatacagagatttagatgaagaagatccgaaagaaatcgaagcgtcaaaatacgatttaagctacatttcccttgatggaaatatcggctgcatggtaaacggcgcgggtcttgcaatgtctacaatggatatcattaaacactacggcggagaacctgcaaacttccttgatgtcgggggcggcgcaaccgcagaaaaagttacggaagcttttaaaatcattctttccgatcaaaacgtaaaaggaattttcgtcaatattttcggaggcatcatgaagtgtgatgtcatcgccgagggcgttgttgaagcgacgagacaagtcggattgacattgccgctggtcgtgcgccttgaagggacaaacgtagatttaggaaagaaaatcctgaatgaatcaggcttaaacatcacatctgcggaatcaatggcagacggcgcacagaaaatagtatccttagtttaggaaagaatgaaaggcaggggaccagataatgagtgtttttatcaataaagatacaagagttattgtacaggggattacaggttctaccgctttatttcatacaaagcagatgctggaatacggcacgaatatcgttggcggtgtaacacctggaaaaggcggaacggaagcggaaggcgtaccggtattcaatacggtcgcagaagcggttcatacaacgggcgcagatgcgtcagttatttacgtgccggctccgtttgcggcggacgcaattatggaagcggttgacgcggaaattgatcttgtcatttgtatcactgagcacattccggttttggacatggtgaaagtgaagcgctttatggaaggcaagaaaacgagattaatagggccgaactgccctggtgttattacacctgaagaatgcaagatcggcattatgccgggatacattcataaaaagggtcatgtaggcgttgtgtcccgttcaggaacattgacatacgaggccgtccatcagctttcagaagccggcgtaggccaatctaccgctgtagggatcggcggcgatccggtcaacggcacgaactttattgacgtgttaaaagcgttcaatgaagatcctgaaacacatgccgtcatcatgatcggagaaatcggcggaacagctgaagaagaagcggctgagtgggtgaaagcgaacatgacgaagcctgttgtcggctttatcggcggtaaaaccgcgcctccgggaaaacgcatgggccatgcgggcgccatcatctccggaggaaaaggcacggcagaagaaaaagtcaaaacgatgaacgcctgcggaattgaagtcgcggaaaccccttctgtaatgggtgaaacgctgattaaggtgttaaaagaaaaaggcttgtttgaaacgtgcaaaactcactgatcgaagcaggggcagccgtaacggctgttcctgtttttgctgaaaaaaagaggaggtttccagatttggatcaagcatcgcgctgtttaatggtctgcagtattaatcaaatcatctccccgtctcttctattaaaatggtggaaagctgatcattctctgtcttttttaccggatccgcatccattaactgttttatcagaagggaaaacagccccggaagcaatttttcgggaaatagagcgcaaggatccggaacttgatgaagttctgtccgattaccgccgcgaaggcattactgccattccgatttcatcaagccgctatccaacatggcttaaagcgatttatgatccgccggctgtcttgtatgcaaaagggaacccgctgcttcttgaaaaaggcagaaaaatcgggattgtaggaacgcggaaaccgacggaagacggaataaaagcggttgggcatctttccgccgaactctcaaaaaaaggctgggtcattgtaagcgggcttgcatccggtatagacggattgtctcataaggcgagcatcagggcaaaagggcttacgatcggcgtgatagcgggcggattccatcacatctatccccgggaaaatctcctgttagcagaatacatggctgaacaccatctcctactctcagaacatcctcctgaaacaaagccgaaaaaatggcactttccgatgagaaaccgcataatcagcggattaagtgaaggaattgtggtcgtgcagggaaaagaaaaaagcggttcattaatcacagcttaccaggctctcgatcaaggcagagaggtatttgccgttccgggttccatatttaatccatattccggaggacctataaaactcattcaagaaggggcgaaagctgtattatgcgcagaggatattgacggagagctgaccgcccgatgcgttcagtatacggaacccttttgaaatatcgtttgacaaacggtattgtaatatttaataatagtgaggatttaaagttgcacattattttcatgtataaaatgacgttcatcataaagaatgaaatgttgaaagccataaaaaggcagctctaaaatgaattgatacttgaaaagagagagaacacctcttgagggggatgaaaatgtctgattatctagtcatcgtggaatcgccggcaaaggcgaaaacgattgaacgttatttagggaagaaatataaagtcaaagcttcaatgggacatgtccgggatcttccgaaaagtcaaatgggagttgacatcgaacagaactttgaaccgaaatatattacgatccgcggaaaaggccctgttttaaaagaattaaaaacagcggcaaagaaagcaaaaaaagtctatctcgcggccgaccccgacagagaaggggaagcgattgcatggcatctcgcacacagtcttgatctggatctcagctcggactgccgggtcgtctttaatgaaataacgaaagacgccattaaagaatcatttaaacatccgcgcatgattaatatggatcttgtcgatgcgcagcaggcgcgccgcatactagacagactcgtcggatacaaaatcagcccgattctttggaaaaaagtaaaaaaaggcctcagtgcgggccgtgtgcaatccgttgcactccggctgatcatcgaccgggaaaaggaaatcaacgactttaaacctgaagagtactggacgattaccggctcatttttaaagggaaaagagacgtttgaagccggatttttcggaaaaaacggcaaaaagcttcctttaaaaagcgaagaagacgtaaaagccatccttgctcagctgaaaggtaataagtatacagttgacaaggttacgaaaaaagagcgcaaacgaaatcccgctctgccgtttacaacgtccactctgcagcaggaggctgcaagaaagctgaatttcagagcgaagaaaacgatgatgatcgcgcagcaattatatgaaggaattgatctcggcaaagaagggacagtcgggctcatcacgtatatgagaacggactcaacgcggatttccaatacagccgttgaagaagcgtcagcttttattgatcaggcgtacggaaaagagtacttagcgggaaaacggaaaccggcaaagaaaaatgaaaacgcacaagatgcccacgaagcgatccgcccgacttcggtgctcagaaaacctgccgacttaaaagcggtgcttggaagagaccagctcagattatacaagctgatttgggagcgctttgttgcaagccagatggcccctgccgtccttgatacgatgagcgtcgatctcagcaataacggattgacattccgggcaaacggaagtaaagtcaaattcgccggcttcatgaaagtctatgtagagggtaaagacgatcagctggaagaaaaagaccgcatgcttccggaccttaaagagggagacacggttttatcgaaagatattgagcctgagcagcactttactcagccgcctccgcgttatacagaggcgcgcctggttaaaacgcttgaagaactggggatcggccgtccttcgacatatgcgccgactcttgacaccatccagcgccgcggttacgtgggattagacaataaacggtttgtgccgactgagcttgggcagatcgtgctggatcttatcatggagtttttcccggaaatcattaacgttgaattcacggctaaaatggaaagagaccttgaccatgttgaagatggccagacagaatgggttcaaatcattgacagcttctataccgatttcgaaaaacgcgtgaaaaaagcggaagccgaaatgaaagaagtggaaattgaacctgaatacgccgatgaagattgtgagttatgcggctcccggatggtttataaaatgggccgatacggcaaatttatggcgtgctccaatttccctgactgccggaatacaaaaccgattgtcaaacaaatcggcgtaaaatgccctaagtgccatgaaggaaacattgtcgaacgaaaatcaaaaaagaaacgcatcttttacggctgtgaccgttatcctgaatgtgacttcgtatcttgggacaaaccgattgaacgaaaatgcccgaaatgtgaaaatatgctcgtagagaaaaagcttaaaaaaggcatacaagtccaatgcgtcgaatgcgattataaggaagaaccacagaagtagcggtgagcagagccttgctcaccttctttgtgtggaagggacaaacaacaggagatgaaaagaaatgaaccagcaaacagttaatgtaatcggagcaggccttgccggaagtgaagcggcatggcagcttgcaaaacgaggaattcaagtgaaactatatgaaatgcggcccgtcaggcagacggcagcccatcatactgataaattcgccgaactggtatgcagcaactccctccgttcaaatacactcgccaatgcggtaggcgtattaaaagaagaaatgcgggcccttgactcggcaatcattcaatctgctgataaatgctcggttccggccgggggagcgcttgccgttgaccgtcatgaatttgcgcaaagcgtgacggatctcgtgaaaaaccatccgaacgtaacggttcttactgaggaagtaacagagattccggaaggcccgactgttatcgcgaccggaccgcttacgtcagaatcgctttcacagcagctgaaagagctcacgggagaagagtatctgtatttttatgacgcggcggcgccgattgtcgaaaaagacagcctcgatatggagaaagtgtacttaaaatcccgttatgacaagggagaagcggcgtacttaaactgcccgatgacagaggaagagttcgaccgtttctatgaagcattgacgacggctgagacggtacctttaaaagaattcgagaaagaaatcttctttgaaggctgcatgccgattgaagtcatggcgaaaagaggcaagaaaacaatgctgttcggaccgatgaaaccggtcggactggaagatccgaaaacaggcaagcgcccttatgcagtcgttcagctcagacaggatgatgcggcgggaacgctttataatattgtaggttttcagacacatttaaaatggggagaccaaaaagaagtgcttaaactgatccccggtcttgaaaatgttgatatcgtcagatacggcgtcatgcacagaaacacatttatcaactcgccgagccttttgaatccgacatatcaatttaaacagcggaacgatctgtttttcgcgggccaaatgaccggcgtagagggttatgttgaatctgccgcttcaggtcttgtagcgggaatcaatgccgccaaacttgtgctcggtcaggatcttgtgacattcccgcaggagacggcgataggaagcatggctcactacattacgacgacaaatcagaagaacttccagccgatgaatgcaaacttcggcctcttaaaagaattgcctgtaagaattaaaaacaaaaaagaacgaaatgaagaatacgctaaacgcgcaattgagactattcaaactatttcgaaaacgatatagcttttcattgcaacttcgatgcattatatgataccatttaaaagcccttcggagagggaggtcttcataatgactgagaatgttaacttttttttaaagttattcgttgaatatttacaaattgaaaaaaattattcacaatatactattgtgaattatgttaattcgattgaagaatttgggatgtttctgcatgctcaaaatataaatggaatgaaagaagctgcatatcatgatgtgagaatatttttgacagaggcttatgaaaaaggcctgtcaagaaaaacaatcagcaagaaaatttcagctttgagaagcttctataaatttttaatgagggaaaagcttgttgaagagaatccgtttcagcttgttcatctgccgaaacaagagaaacggattccgaagtttctttatgaaaaagaacttgaggaactattcgctgtttcagacagaagtcagccgtcagggatgcgcgatcaggccctgcttgagcttctttatgcgaccggaatgagggtcagtgagtgctgtacgctcactgtcagcgatcttgacctgttcatggatacggtgctcgttcacgggaaaggcaagaagcagcgctatatcccgttcggctcatatgcccgtgatgcgctggagctgtatatcaacagcggaaggcagtgcctgcttgaaaaagcaaaggagcctcatgatgtgctgtttgtcaatcaaagaggcggcccgctgaccgccagaggaatccggtatattttaagcgggcttgtaaaaaaagcatccggcactttacatatacacccgcatatgcttcggcacacgtttgcgactcatctgctgaatgaaggggctgatttaagaagcgtccaggagcttttgggccattccaatctgtcttctacgcagatttacacgcatgtatcgaaggaaatgctgagaaacacatatatgtcccaccacccgagagcttttaaagaaaattaaaaggaggcccttctcatgtcatcttttcatgcgacaacgatttttgccgtccagcataacgggaaaagcgctatgtcaggagacggccaggtcacattcggtcaggctgtagtcatgaaacatactgcaagaaaagtgagaaagctgtttaacggaaaggttctggccggatttgcgggatctgttgcggacgctttcacactttttgaaatgtttgaggcgaagcttgaagaatacaacggcaatttaaaacgtgcgtcggttgagcttgcgaaagaatggcgcagcgataaagtgctgcgcaagctggaagccatgctgattgtcatgaaccaggataccttgcttctcgtatcgggaacaggtgaagtgattgagccggatgacggcattttggcaatcggctccggcggaaactacgccctgtcagcaggaagagcgctgaaaacctatgccggagagaatctgtccgccaaagatattgcaaaagccgctttgaaaatcgcgggcgagatttgtgtgtacacaaacgatcagatcattttggaagaacttgaatagaaaggacttgaggcgcatggaaaacaaaccgttaacaccgagacaaatcgtagatcggttggatcaatacattgtaggacagcaggatgcgaaaaaagctgtcgccgtggcattaagaaaccgctatcgcagaagtcttcttgatgaaaaactgagagacgagatcgttcccaaaaacatcctgatgatgggcccgaccggggtggggaaaacagagatcgccagacggatcgccaagcttaccggtgcgccatttataaaaattgaagcgacaaaatttacagaagtcggctatgtaggcagagatgtcgaatcaatggtcagagacctcgttgagacatccgtgcggctcattaaagaagaaaaaatcagcgaagtgaaagaacaggctgaagaaaatgcaaacaaacgtatagtgcggcttctcgttccgggaaagaaaaaacaagcgggtgtgaaaaatccgtttgaaatgcttttcggaggaaaccaggcggcaaatgatgatgaagccgaccagcaggaagaagcaagccttgaagagaaaagaaagcgcatggcgcatcagctcgcattgggagagctcgaagaccattacgtctccgtagaggtggaagagcagcagccgtcgatgtttgacatgctgcaaggctccgggatggagcagatgggcatgaatatgcaggatgcgctgagcaatctggtgccaaaaaagaaaaaacgccgcaaaatgacggtcagagaagcaaggaaggttctgaccaatgaagaggcaggcaaattaatcgatatggatgaagtcggccaagaggccgtgttaagagctgaagagggcggcattatctttattgacgaaatagataaaatcgcaaaaaacggaggggcttcttcctcagcagatgtatcgagagaaggcgttcaaagagatatccttccgattgtcgaaggatctaccgtcgtcacgaaatacggctccgtcaaaacagatcacgtgctgtttatcgcagccggggcattccatatggccaaaccgtctgatctgattccggagctgcagggccgctttccgattcgtgtagaattgagcaagctgacggtagatgattttgtgaagattctcgtcgaacccgataacgcgctgttaaaacaatatcaggctttattgcagacagaaggtatatctcttgaattttctgacgaagctattcgtaagatcgccgaagtggcttatcatgtgaatcaggatacggacaacatcggagcgagaaggcttcacacgatattggaacgtctcttggaagacctgtcgtttgaagcgccggacgtaacgatggaaaaagtcgctatcacgccgcaatacgttgaagaaaagctcggaacgattgcaaacaacaaagatctaagtcaatttatattgtgaaaatttaataagaggaattctaggaggattatttatcatggctttactacaaaaaacacgaattattaacagcatgctgcaggctgcggcaggcaaacccgtaaactttaaagaaatggctgaaacgcttcgtgacgtcattgattctaatattttcgtcgtcagccgcagaggaaagcttttgggctactctattaatcagcagattgaaaatgaccgcatgaaaaaaatgcttgaagaccgccagttcccggaagagtacacgagaaatctgttcaatgttccggagacgtcttcaaaccttgatatcaacagcgaatacacggcgtttcctgtagaaaacagagacctgttccaagcgggcttaacaacgatcgtgccgatcatcggcggaggagagagactgggcacgctcattctgtcccgtctgcaggatcaatttgaagatgatgatctcattcttgctgaatacggagcaaccgttgtaggaatggagattttaagagaaaaagcggaagaaatcgaagaagaggcgcgaagcaaagcggttgttcaaatggcgatcagttctctgtcttacagtgaacttgaagcgattgagcatatctttgaagagcttgacggaaacgaaggcttgcttgtggcaagtaagattgccgaccgtgtcggcattacgcgttcagtaatcgttaatgcgctgagaaagctggaaagcgcaggtgtcattgaatccagatcactgggaatgaaggggacgtacattaaagttctgaacaacaaattccttatcgaattggaaaaccttaaatctcattaagacaaaagcaggatccctaaaaatggaggtcctgctttttttatggacaataggtgaaaagttgcagtttaaagttgcttattggaatctgatctgagataatccatcttgctgtgtgaaaataaggggaagatacagaaattcggctattttcagtcttatattaatcaaatatttgtagtccaaatactctaggactttatacctatgtgtaaaatggatacaaatgagtacttttttttagcctaacttcatagactttaagcctgttatttcttacaataagcatatggttttacaattctcgacaaggatttttaggagaaaaatatctgaaatggaggtaagtggatttggacttattttctggaactatacaaaatcttgagaatgccttggggagagcggacattaagcaaaaagtcttaactaataacatcgccaatatagatacaccgaactataaggcaaaaaaagtctctttccgaaatttgttagatcaggaaacatccaatcttgaggcggtaaaaaccgactatcggcacgttgactttacgggttcaggggacgattattctatcgtgtccggcagtgatacatcgtaccagcaaaacggaaacaatgtcgatatcgacaaagaaatgacagatttagccgaaaaccaaattaattatcaggctttggttgaaagaatgagcggcaaattcaattctctgaaaaccgtcttgacaggaggaaaataatgagtggctttcaaagcttaaatatttcgggctccgctttaactgcacagcgtgtccggatggacgtcgtatcgtccaacctggccaatatggatacaacgagagcgaagcaggtaaatggcgaatgggtgccttacagaagaaagctggtatctctccaatccggaggcgaatcattttcgtcccttttacattccaagatgaacggaacaggaagcgcgggaaatggcgtaaaggtatctggtgttacggaagacccgtccgcttttaatctcgtttatgatccggagaatcctgatgcgaataaagacggatatgtacaaaaaccaaatgtagatccattaaaagaaatggtggatcttgtcagcagctcgagatcatatgaagcaaacgtaactgcattaaacgcctccaaaggcatgcttttgaaggcgttagaaatcggaaagtaaggtgatgtaagtggttaacgctattactccttttcagcttcaacaaacccaaaatactcaaaacgtaacgaatcaattaaaccaaactcaaaaaactgattcttcaaaccaaacaagcttttcggagcttttaaaaaactctattgattcgttaaatgagtcacaagtgaaatctgaccaaataacgaacgaactggctgcaggaaaggatgtaaaccttgacgaggtcatgatcgctgcccaaaaagcaaatatttctctgacggccgctaccgaattccgcaataaagccgtggaagcctatcaggaaatcatgagaatgcagatgtagtggtcagattgaagagaatgactggaatgaccgggggttaacatgaatcgtactctaatgcaaatgaaaaccaaaacggcagcgttttggaacaacagatcaaaaacacagaagatactcatggtaagcggcttggccgcattcattattttactcatcgtcgttattatttttacttcgtctgaaaagatggtgcctctttataaagatttgtccgcggaagaagcggggaagattaaagaagagctcgatacgaaaaaggtgtcttctgaacttgctgacggcggcacggtcattaaggttcctgagagccaagtggattcgcttaaagtccagcttgccgcggaaggcctgccgaaaacgggatcaattgattattcgtttttcggacaaaatgcgggcttcggcctgacggataatgagtttgacgttttaaaggttgaggcgactcagaccgaattgtcaaacctgataaatgaaatggacggtattaaaagctcgaaggtcatgatcaatatgccgaaagaagccgtgttcgtcggtgaagatcagccggcagcgtccgcatcaatcgttttgcagatgaaaccgggctactcgcttgatcaaaaccagatcaacgggctgtaccatctcgtttctaaaagtgttccgaacttaaaagaagataatatcgtcataatggatcaaaattctacatattatgacaaaagtgacagcggtgcagggtccgtttctgacagttatgcttctcagcaaggtattaagtcgcaggtcgaaaaggacattcaaaaacatgttcagtcactgctcggcacaatgatggggcaggataaggtcgttgtttccgtgacggcggatgttgacttcacgaaggaaaaacgcactgaagacactgtcgaacctgtcgataaagataacatggaaggcatagcggtaagcgccgaaaaagttgcggaaacgtataaaggcgacggcgcggccaacggcggcacggccggaacgggaagcaatgacaccgcgaactatgccgagacaaacggcggttcaaacagcggggactacgaaaaaagcagcaataaaatcaactatgaagtcaaccgcattcataaagaaatcgcggaaagcccgtataaagtgcgtgatttaggcattcaggtcatggtggagccgcctaatccgaaaaatgccgcttccttatcagcacagagacaggctgatatacagaagattttaggaacggtcgtcagaacgtctcttgataaaaacgaaacgcaaaatcaaaacctgacagacaatgatatcaacaataaaatcgttgtatccgttcagccgtttgacggaaaaacaagcctgaacacagattcggcacaatcttcaggtcttccgatctgggtatacattacaggcggcgtactgcttgcggccattattctgcttattattctcctcatcagaaagaaacgctcacaagaggatgaatacgaagaatatgaatatgaaacaccgcccgagccggttcgattgcctgatatcaacgaagagaaaattgaaacggaagaaacagtcagacgaaaacagcttgaaaaaatggctaaagaaaaaccggaagactttgctaaattgcttcgaagctggctggacgaggattagggggaatggaaaatggcgaaacgtgatcagaacaagcttacaggaaaacaaaaagcagccatcctcatgatttccttaggccttgatgtatcagcttctgtgtacaagcatttgtctgaagaagaaattgaaagattgacactcgagatttcgggagtcagaagcgtcgatcatcaaagaaaagatgaaatcattgaagaatttcataatatcgcaatcgctcaggactatatttcacaaggcggtttaaattacgcccgccaagtgcttgaaaaagcgctcggagaagacaaagcggtaagcattttaaacaggctcacctcttctttgcaggtaaagccgtttgatttcgcgagaaaagcggagcccgaacagattttaaatttcattcagcaggaacatccgcaaacgatggcgctgattttatcctaccttgacccggtgcaggccggacagattttgtctgagctgaacccggacgttcaggctgaggtggcaagaaggattgcggttatggacagaacgtctcctgaaatcataaatgaagtggagcgggtccttgaacaaaagctgtcctcctcctttacgcaggattatacgcagaccggcggcatagaagccgttgttgaagtgttaaacggtgtagacagaggaacggaaaaaacgatccttgattcattagaaatccaagatcctgaattggcggatgaaatcaaaaaacgaatgtttgtctttgaagatattgtcacccttgataaccgtgcgattcagcgcgtgatcagagacgttgaaaacgacgacctcctgctttcattgaaggttgcgagcgaggaagtcaaagaaatcgtcttcagcaatatgtcacagcgtatggttgaaacgtttaaagaggaaatggaaattatggggcctgtgcgtttgcgtgatgtggaagaggcgcaatcaagaatcgtgggcgtcgtccgcaagctggaagaagccggagaaattgtaatcgcgcgaggcggaggagacgatattattgtctaatatcattaaacagcaatcatcattttctcctgaacaaaaacggcgcaagctttccttgcaggaagtcaggaaaacacattcccatccagaccgggaggaacccgaaaatccggaggctctcatggcttttgccaaagcagaagccgacagggtgtctgaagaagcgaaaaatcaatttgagcacactcttcggcagattgaagaagagaaaaaccgctgggcggaagaaaaacaaagattgatagaagaagcaaaggcagaaggatatgaagaaggcatggcattgggaaaagccgaggctcaagctgaatacgccaatctcatcagccgggccaatgccgttatggaaatggcgagacagtcagtcgaggaaaaactggaaagcgctgaggaagaaatcattgagctttccgttgcgctcgctaaaaaagtatggcggcaaaaaagtgatgataaagaggcttttcttctgctggtcaaacaggtagtagccgaagtaaaagattatgatgacatctccatctatgtggaccctgaatattatgagacggttcatcagcatatggacgaaattcagcagctgttatacaaagaatgcagattaagcttatatgccgatgaaaaagccgcgaagggagcgtgctcgatagaaactccgttcggacgtgttgatgcaggcatagacacccagctgatgcaattaaagcaaaaacttttaacggcgcttgaggcgggagcggagcaatgaagacacagtatttaatagactcaattgaaacagcggatccgtacaagcgctacggcaaggttaaacgggtcatcgggctgatgattgaatcaaaagggcccgaaagctcaatcggagatgtttgtctcatttatccgaaaggccatgcgaaaaaagcgattaaagctgaggttgtaggcttccaagatgaaaacattctgttaatgccttatctggaagcggccagcattgcgccgggcagcattgtggaggccactggggagtcgctccgcatcaaagtaggcgcgggtttaatcggacaagttgtcgacgcgttcggcgaacctcttgacggccgggcgcttccgaaaggtttgtcccccgtttcgacggaacagccgccgccaaacccgatgaaacgcccgccgatacgggaaaagatgggtgtcggtgtcagatcgattgacagtctgctgacggtaggaaaagggcagagaatcgggatttttgccggaagcggagtcggaaaaagcaccctgatgggaatgatcgcgaagcagactgaagctgatttaaacattatcgcactcgtcggggaacgggggcgcgaggtgcgtgaattcatcgagaaggatttaggcgaagaaggcctgaaacgctcgatagtcgtagtcgcgacctctgatcagcctgccttaatgcgtttgaaagcggcgtatacggccaccgccattgcagagtacttccgggataaaggccggaatgtgatgttcatgatggactctgtcacgagggtcgcgatggctcagcgggaaatcggcctggcagcgggagaaccgccgacaacaaaaggatatacaccttctgtgttcgctattttgccccgtttgctggaaagaacgggcgcgaatgaacaaggaacgataaccgctttttatacggttctcgtagacggagatgacatgaacgaaccgattgccgatacggtgcgcggaatattagacgggcatatcgttctcgatcgggcgcttgccaacaaagggcagttcccggccgtgaacatcctgaaaagcatcagcagggtcatgtctaatatttcagacacatcgcatatagaggcggccaacaaattccgcgatcttctgtcaacttatcaaaactctgaagatctcattaatatcggagcttacaaaagagggtcatctagagaaattgatgaagcgattcagttttatccgcagcttattcaatttttaaaacaaggaacggaagaacctgctcaattggaagacagcattgcggcattgacgagtctgacaggaaaagaggaataaacatcgtggcataccaattcagatttcaaaagctgctggaattaaaagaaaatgaaaaagaccaaacattgactgaatacagacaatcggtttctgaatttgagacagtggctgaaaaactatatgaaaatatgagcaaaaaagaattgctcgaaaaagacaaagaatcaaagctgaaatgcgggatgagcgttcaggaaatgagacattatcagcaattcgtttccaatcttgagaacaccatctatcattatcaaaagcttgtcatcatgaaacgaaatgaaatgaatgagaagcaggaacagctcaccgaaaaaaacattgaagtaaagaaatttgaaaaaatgcgggaaaaacaatttaatatgttcgcacttgaagacaaagctgcagagatgagggaaatggacgacatttcaatcaagcagtttatgattcaggggcattaggagcgaatgaaatggccgataaagaaaagagatctggaaagttcggttcaatcctgctttttatcatgatcccgctgatttttctgatcatcgtcgcaagcatcatcctttgggctgccggcgttgatgtgatgaagccgattcaggaaacagccgctaaaacgcctgttttaaaagaattggttcccgaaacgaaagaaatgaaaagcgcggcggaaaagcagaaggaagacagaacggcttctcttgaaaagaccataaaggaacaaaaaagtgaaattaacattttgaataaagatttagacacaagcaagtccgaaatcgataatctgaatcagaaaatccgttcactgaaacaggaagctgaacagcagcagaaaacgaagacggatgaaatgaaaaaagacgcttcggaatcagccggaaaagataaaatgatcaacatctataaaagtatggacagcggtaaagcggcaagcattatcgtaaagctgaaagaaaaagaagccctcgatattttaaacggattaagtaaaaagcagcttgctgaaatcttgacgaaaatgactcctgaacaagcggctaaatatacagaaaaactatccgctgacggaaataaggagtgatgtaagttgaagctgcttgaattaacgggtaatcgtacgcagactgtgcaaaacagcaatgtgaagatgaatgtaaacagcttaggtctatttcagaactggctcctgtcggaaatcacttctccccggcagcccggagatgaaacaaaaacaagtgacgcagagctgaatgatgccttatcgaaaatcggtgattggctgaaagccggcccggaagataaagaattgcagctaaaacagctgcttgaggcggtaaaagctcttgaaggaaagcagacggctgaaacagctcttcctttattgaaacagcttgccgaatctgttgaagacatgttagcgggaaaacagcatggagcgaagcctgaaacggatgagccggattcttccgcaaaagacggggattccgtcaaggatgcgcttgagaagggcctgcttttcattcaagaagccgtatcccagctcttcacatctcagcaggaactgccggacagcgcgcaggcaaaggcggtttaccaggaaggcgcccgtttattagaggcattgaaaaaacaaggtgtcccagaccgcgtgattcaagacctgcggcagacattttttccgaaaaacgaatctgcatctaaactttactccatgacagccgctgagctgaagagctttcaaagcgtcgcggagcagcttgcgggcctttctcaaaagggaacaaaggaatgggatatggctgaaactgagctgaaagcttttgtgttatctcaatcatctgaatcatcccaagagtcagccgggaaaacagaacagcaaaacggcggcacggtttctcacgcaaaggcgcctgacagcaaattgtctgcacatatactgttttcgggaacgagaagccttgccggcattcagcaaacgtccgcaggaactgaacagcagccggcagaaaataaaccgttaacggatcaggtcataagcggctggaaacagatgaaatacacgcctttcgggaaaacaaccggaagctttacgattcgtcttaatcccgagaacctcggatttgtcacaattaaggtgacaaacgaaaacgggatgtttcaaagcaaaataatcgcatccagccagtccgcgaaagagctgctggaacagcatcttcctcagctgaaacaatcgcttccgaatatgtcggtccaggtcgaccgttttacagtcccccttcaaagcggggatcagcagcctgtttacgggcagacggccgatcacaataaacagcagcatcagggacagagagagcagaagaaccagcagcagtcaggcgatttcggagatatgctggaggagctttctctcaatgaaatggaggaagaatagttgacatcagtaaactcggattatgccgcggcgggcgcttcaaccacttcaagcgcgaagagcaccgccgcagtaaacagcagcacgaatttagggaaagacgaatttctgaagatcttaatgacacaggttcaaaaccaggacccgctcaatccggttgatgacaaagaattcatcagccagatggcgacattttcttcattggagcaaatgatgaatatgaatacgacgatgactaaatttgtagaaaatcaagatccgtttacgatgtatgtgaactggatcggcaaaaatgtcacattcagcgacagcgacgggaaggatcagacaagcccagtcaattcagtcaagcattcaaacggcaattacgtgctcgtgcttgaaaacggcaaagaggtcagtccgtggaatgtcacggccgtcagcgaaacatctaaataataagaaactcagggggaatttaacatgttacgttcattatattccggtatcagcggcatgaaaaactttcagacaaaactagatgtaatcggcaataacatcgccaacgtcaacacagtgggatttaagaaaagccgcgttacatttaaagatatgatcagccagacagtcgccggcggttcaaacgtgaccaattcaaaacaaatcggcttgggtgccgcgacttcttccattgatgttgttcattcaaccggcgccccgcaggctacacagaataaaaccgacctagccattgacggagacggctactttcagattaatacaggtgcgggaattgtttacacacgtgcggggaatttcggaaaggacaatcaagggaaccttgttacgactgacgggtactaccttgaaaaaatcggcggcggtaaaatcaatattccgactgatgcgaaagattacagcatcggtgcagacggaaccgttacatacactgatgcaggggatgaggttcatgatgccggacaaatcggtctggtcacgttccctaacagcgcaggtctggaaaaaatcggaggaaacctttacagagaatcattaagttcaggagctgcgagcgcagtcaccactccgggcgaaaacggaacgggtaagcttttggcaggctatcttgaaatgtcaaacgtagatctgacagatgaatttaccgaaatgatcgttgctcagcgcggtttccaatcaaactcaaaaatcattacgacttcagatgaaatccttcaggagctggttaatctgaaacggtaaggagggaggagaggcggttaggccgcttctccggattgcatgattcaagtcacccgtttaaacggccagccttttacgctgaacgcgctgtttatcgaacagattgagtgcttccccgacacgacgattacactgtccaacggcaaaaagttcgtagtgaaagaaccggaagaagcagttctcaaaaaagtcatatcgttttaccatagcatacaaatattttcactggatcagggaatagaggaagaagaatgaagaaaaaattagtcatcattttgctgattattttaattgtcatcgccggcctcggaacggcagcatattttgtcgtcagcggacattccggcaaagataaaaagccgacaattgacgaagtcgttgcagccactgtgtctgtcgacgatatcacgacaaacttaaagtctgacagcatcatccgtatcggcatcaagcttgaaaccgactcggctaaagcgaaggaagaacttgaaaaacgcgattttcaggtgaaagacaacatcatttccattttagctgacacaagcgccggagagattgagggagataaaggaagagaagcgtttaaacaatcattaaaagagaaagtaaacagctatctccaagaaggaaaagttcagaaagtgtacattacctcctttaatctgcaataaaaacaaatttgacagaatacggaggtgaagaaaatgtcaggagaagttctctcccaaaatgaaatagacgcactgctttccgccatttccacgggtgaggcggatgcggaagagctgaaaaaggaagttaaagagaaaaaagtaaaggtatatgattttaaacgggctctcagattctcgaaagatcagatacgcagtttaacccggatacatgataactttgcgaggcttctcacaacacacttttccgccaagctcagaacgtatattcatatatccgtcagctcagttgaccaggtgccgtatgaagaatttatccgttccataccgaacatgacgattttaaatttattcgatgttcatccgatggaaggcagaatcatgatggaggttaatcccaccatcgcatacgcaatgcttgaccgcgtcatgggaggcatcggcatcactcataacaaagctgacagccttacggaaattgaaacgaatattatttctaacttatttgaaaatgcactgggcaactacaaagaagcttggcaatcgattgctgatattgaccctgaaatgactgaatttgaagtgaatcctcagtttgtgcagatggtttccccaaatgaaacagtcgttgtcatttctctcaatacacagataggtgaaatcagcggtgtcattaatctttgtattccccatgtcgtacttgagccgattatccctaagctttccgtacattattggatgcaatcagaccggaatgaagcgaagcccgaagaaacgaagttgcttgaaaagcgcatcatgacggctcaaattcccgttgtggctctcttgggcgcttctgaactgacaatagaagaatttttaagtttggaagtcggggactgtataactctggacaaatcagtgactgatcctcttactgtattggtcggaaacaaaccgaagtttttagggcaggccggccgggtgaatcgaagacaggcagtgcaaattttagatcacgacataagaggtgaacaagatgaacaatagattatctcaagatgaaatcgatgctcttcttaacggcacaagcagtcagtcagaggatacagaacagcctcaaggggcgaacttgtctgaacttgagcgcgatgcgatcggagaaatcgggaatatttcgttcggcagctcggctacggcgctgtccactcttttaaatcaaaaagtggacattacgacgccgagtgtgaccgtcatttcaaaaagcaaaatcagtgatgaatttcctcatccgtatgttgccattgaagtgaactacacagaaggctttgacggcagcaatttgctcgtcgtcgaacaaagcgacgcggccatcatcgcggatttgatgatcggcggggacggccggggcgccgatccgtcactcggtgaaatccacctgagcgccgtgcaggaagcaatgaatcaaatgatgggctcggctgctacgtcaatgtcgaccgtgttcagtaaaaagattgacatttctccgccaagggttgaacttctggatgtgacggaagaaaaagggactgacagaatacctgaggatgacctgctcgtaaaagtgtcattccgtctgaaagtcggcgaattaatcgattcgagcatcatgcagctttatccgattacgtttgcgaaagatctgatcgcagacctgatgactgcagaccagcatgagtcagaggccgcagaaaccgtatcagaaccacaggaaacatacgaaacgccgcagccggaacctgccatgcagccggagccgcaggcaaaacccgagcttccgaagagacagggaaccgcaaaaaaagctgctcctgttcaagtcgctccggtagaattccaggcgtttgatcataacgaagcggcgcaaggatcaaggaataaccttgatatgctgatggatattccgctttccgttacggttgagctcggcagaacgaagagaagcgtcaaagaaatccttgaactttctgcgggaagcattattgagcttgacaagctggctggtgaacctgttgacatcctggtcaaccagcggatcgtggcaaagggcgaggtcgttgtcatagaagaaaacttcggcgtgagagtcactgatattttaagtcaggcagaccgccttaacaatttaaaataagcgaacatagaggagagaaacattatggcacacagaattttaattgtagacgatgcagcatttatgagaatgatgatcaaggatattttagtgaagaacggttttgacgttgtagctgaagcttcagacggagcgcaggcagtcgaaaaattcaaagagcattcccccgaccttgtgacaatggatattacaatgcctgaaatggacgggattacagctttaaaggaaattaaacaaatcgatccgcaggcgaaaatcatcatgtgttcggctatgggccagcagtcaatggttattgacgcgattcaagccggcgcaaaagactttatcgtgaaaccgttccaagcggaccgcgtgcttgaagctattaataaaacattaagctaaagggtgtacgactgttgaaaaagagtcatggtttactagctttgatttgttgtttcgttttactcaatgtacatccgttccctgcttttgcggcggagtctgacaattccaccgtcaacgaatggtttgacaaacaatcaacaaacaaaacagagaaaaaaagcgatacatcgaaacaaacggctgatcaagagataggggatgcttctgcatcttctgtctccgcttttgattttgtaaagatgattggggcgttattattcgtcattctgctgatctatggatttgtcaaactgatgaatagaagaaaccgtctgctgaagccgtttcaatatgtagaaaatatcggcggaacgtcagtcggccaaaaccgttccgtgcagctgatcaaagtgggaaacagcgttctcgtagtcggtgtgggcgaaacgatacagcttttaaaagaaattgaagatgaaaaagagcgcgaggcgattctgagccaatacgaagagtcgatgtcttcaaaagtggaatggaccaagctcgtaaatccgcgtaaggatggagaaaaaaagccgcaaacgatgcttccgtcgttttcaaaagcgctgaaagaacagctgaacgagctgaaacaaagccgttctgaaggaaagaagaaaggcccttatcaccatgaatgaattcattaatctttttaattcaaacagtccgaccgaagtcagctccactgttaaattactgctgcttttgactgtcttttcagtggcgccggggattctgattttgatgacctgctttacgagaatcgtcatcgtcctgtcttttgtaagaacctcactggcgacgcagaacatgcctcccaaccaggttttaatcggccttgcgctgttcttgacgttttttattatggcgccgactttttcagagattaataaggaagccttaacgccgctgatggacaacaaaatcagtctcgatgaagcatatacaaaagccgagaagccgattaaagagtatatgagcaagcatacaaggcagaaggatctggcgctgtttatgaactatgccaaaatgaaaaaacctgaatcgattcaggatattcctttgacgacgatggtgcccgcttatgcgatatcagaactcaaaaccgcttttcaaatgggctttatgatttttattccgtttttaattatcgatatggtcgtggcgagcgtcttaatgtcaatgggaatgatgatgctaccgccggttatgatctctctgccctttaaaatattgcttttcgttttggtcgatggatggtatttaatcgtgaaatctttgcttgacagcttttagggtaggtgctaattgtgagttcagaatttgtaatttccatggcggaaaaagccgtatatgtaacactaatgatcagcgggccgctgcttgcgatcgcgctgatcgtcggtttgctcgtcagtatctttcaagcgacaactcaaatccaggaacagacgcttgcgttcattccgaaaatcgtggcggtaatgcttggactgatctttttcggtccttggatgctgtcgacgattctttcgttcacaactgatctgttctctcatctgaaccgatttgcagggtagaatcaaatgaattccatcattgatttatttcccgcttttttattggtctttatcagaatctctgctttttttgtaacggtgccggtgttcgggcatcggaatctgccggcggttcaccgaatcggctttgctttttttctttcggtgatctgcttcagcacgctgaaacatgcgccggaaatagaaataggggaacagtatatgcttcttgtcataaaagaggccgttgtgggcttgagcctcgggctgatcgctttcatgatgctgacagccattcagatagcaggttcctttattgattttcagatgggcttttccatcgccaatgtcattgatccgcaatcaggaacgcaaagcccgctgatcggacaattcgtttatacgctggcgctgttatttatgctcagcataaacgcccattatcttttgttggacgggatttattacagctttcagtatatcccgcttgatcaggcatttccgtcgtttggaaatgatcactttggactttttatcgcaaaaagcttcaatgccatgtttattatcgcttttcaaatgtctgcgccggttgtggccagtctgtttttagttgatttggcgctcggtatcgtggcgagaacggtgccgcagctgaatgttttcgttgtcgggcttcctctgaaaatagccgtgagctttattatgctgatcgtttgtatggcggtgatgtttgtcgttgtccgcaacatcttcagccttaccgttgaaaccatgcggaatctattggcattggtcggtgtgacatgatgaggctcagactgaatctgcaattctttgccggtgaaaaaacggagaaagccacgccgaaaaaacggaaggatacaagaaagaaaggacaggtcgcgaaaagtacggatgtgaatacagccgtttctttactgattatctttctttcgctgatcgcgctcggtccttatatgcgggacaggctgctgtcctttattaaaacgttttatacgaaatcgatatcattacatctgtctgcatctgccgtgcatgaactgttcgtggatacggtgaaagatatcagcctcatcctcgcgccgattatgctggtcgcgcttgtggcaggtgtcgtgagcaattacatgcaggtgggttttctgttttctgcggaagtcctcaagcctgacttgaataagctcagcccgctgaaaggatttaagcggatttacagcatgagggcgattgttgaactggtcaaatccattttgaagattactgtggtcggttttgccgcctttatggtgctctggctgcattatggcgatattctccgccttccgcttttgactcctgcggaagtgctcactttcgtttccaagctcactctttggatggggcttgcgggatcaggggctttaatgctgctggccgggcttgattacttatatcagcgttttgattatgagaaaaatatcagaatgtcaaaacaggatataaaagatgaatacaaaaaatcggagggtgatccgataatcaagtccaaaattaagcagaagcagcgggaaatggcgatgaggcggatgatgcaggaagtgccgaaagcggatgtcatcattaccaacccgacccattatgcgatagctttaaaatatgatgaaaagaaaatggacgccccttacattgttgccaaaggggtcgaccatctcgcattaaaaatcagacagatcgccaaagaacacgatgtcatgacgattgaaaacaggccgctcgcacgtgcgttatatgatcaggttgacattgaccaggccgtgccggaagagtttttcaaagtcattgcggaaattttggcttatgtatataaaacgaaacaaaaagtatagtgaatttcagattcaaaaggagagaaaaacagcatgtcaacaagagatttatcggttttaataagtgttgtcctcattgtggcaatgctggtgattccattccctccatggttgttaagtattttgatcatcattaatatctctcttgcgttgatcgtgcttctcaccacaatgaatatgcaagaaccgctgcaattctcgatattcccgtcattgctgctgttattgacgctgtttcggctttcgctcaatgtgtcgacgacacgttcgattctttctcacggagaagggggaaaggttgttgagacattcgggaatttcgttgtcggcggaaatgtgctggtagggcttgttgtcttcattatcttgattattattcagtttatcgtcattacaaaaggcgccgagcgggtatcggaagtggcggcgagatttacgctcgatgcgatgcccggaaagcaaatgagtattgacgcggatttaaatgccggcatgattacggagcaggatgcaaagcacagacgtgaaaaagtcgcccgggaagcggatttttacggcgccatggacggtgcgagcaaattcgtcaaaggggatgccatcgcggggatcatcatcgtgatgatcaatattattttcggaatcgtaatcggcatgctgcagcaggggatgagcatacaagaagctgcgtctcactttacaatgctgacggtcggtgacggtatcgtttctcaaatgccggccttgctcatttcaacggctacggggattgtcgtgacgagagcggcatctgaaggaaacctcggtcatgatattacaggccagctgtttgcttatccgaagctcttgtatgtagccgcgggaactgtacttttgctcggtcttcttacaccgatcggcattctgctgacggggccgatcgccggtctgcttgcattcggcgcttacatgctgtccaaagcggataagccgagcgaagaagaggaagaaattcttgaagaagaggctcaggcggatgaactgaaaagcccggaaagcgttgtgcagcttttacatattgatccgattgaatttgagttcggatacggactcgtgccgcttgcagacgcggggcagggcggtgatcttcttgaccgcatcgtcatgatcagacgtcagcttgcgcttgaattgggacttgtcattccggttgtgcgcatcagagataacatcgcgctccagccgaatgaatacagattgaaaattaaaggcaatgaagtcgctaaaggagagctcctgctagatcattacttagcgatgtcaccgacgcctgaagatgacgtcattgaaggaattgaaacgatagagccgtcgttcggacttcccgcaaaatggataagtgaagctgcaaaagatgaagcggacatgctggggtatacagttgttgatccggcgtcagtcgtatctacgcatattacagaaaaaattaagcagcatgcccatgaactggtcggcagacaggaaacaaagcagctgatcgatcatctgaaggaaaattatcctgtgcttgttgaggaagtcacgccaaaccctctttctgtcggcgatattcaaaaggtgcttgccaaattgctgagagaaaaagtttcaatcagaaacttggtgaccatttttgaaactcttgccgattacggaagattaacgacagattcagaccttttgacagaatacgcgagacagtcgcttgccaaacaaatcacggcacaatatgcgagagagcatgaaacgctgaaggtcatcacatgctcaggccgggtggaaaaagcgattgcagacggggttcagcagactgaacagggcaattacctgtcactcgaccctgaggtttcagacagcatcatccgttctgtcgctaaagaggccgagcagctttccatccgccaggagtcggcgattcttctttgctcgcctgctgtcagaatgtatgtaaaacagctgttagaacggtatttccctgatcttccggttctttcttataatgagctggaagcaaatgttgaagtacagagcattggagtggtggatatttaatgaaaataaaaaaatttacagccgcttcaatgcaggatgccgcgaagcaaatcaaaaaggaactcggcaatgatgccgttattttacattccaaacaagtaaagaaacgaaaatggctggggctgcggtcgcagcaggccgtcgaagtgatagcggttttagatcgtgacgtcagggaagcgagaaaaacgccgccggctgccgctgaagaagtgaaaaagacgaaaacggcggagaaagctgagcctgttcagccgccgcgtcttccggatcaaagtatttccggcgaactggcgcattttaaagaagtgctccctgaaccattaaaaaaagccgagagactattgaagcaagccgggcttcctgatcatacgcaaaacgccgtactcagtgaactgctccgttcttcaattgtttccggagatttaactgaagataatgtcagctccaaactgcaggatttgttagtgaaaaaactcccttcggcagacaggtggcaggaagggattcaatcaaaatacgtcgtgcttttcggttcaaccggggccggcaaaacgactacacttgcgaaactcgcggcctcatcaatgctgacagagcataaaaaaattgcctttatgacgacggatacttaccggattgccgcggtcgagcagctgaagacatatgcggagctgcttcaggctcctcttgaagtatgctattcaaaggaagaatgtctgaaggcactggaaaaattcgctgaatatgaccatgttttcattgatacagccggtagaaactttaaagaagagcagtatattacggaattacaagagatgattccgtttgaatcaggcttacaatcctttctcgtattatcggcatctgcaaaatatgacgatatgaaacaggtgctgaaacagttttcaggtgtgccggtcaatcaattcattttcacgaaaacggatgaaaccgcctcactcggctccgtgtttcaagtgctgtcggaatcaaggatcggcgccgcctatttgacaaatggacaggatgtgcctgaagacatcctatcggcttcaccaaaagagtttgtaaggatgcttttgacatgaaacccgatcaggcagagtcattaagaaggaaaatgagagagcggcaaatgatcaagccggagctttatgagaaaaaagcgaagacattagccgtcatcagcggtaaaggcggcgtcggaaaatctaatttaacattaaacatggcagttgccctgcaggaaaaaggaaaaaaagcactcatcattgatcttgacatcggaatgggcaacattgatgtgctgatcggcgctgcttcttcccgcaccattattgatgtgatggagaatcggcacgcattggcgcaatcactgtcctccggtccgaaaggccttcgctacatatccggaggaacggggcttgaggcgatctatcaagcagacggagagaagtgggcggcttttatgaatggtctttccgctgtattaagcgattttgattacgttctgtttgatatgggagcgggactttcaaaagaacagctgccgtttattttatcggcggaagacattctcgccgtgacaacgcctgagccgacggccattatggatgcctacagcgcgatcaaacatctcttgctcgcggatgaacggctgaccgtaaacattgccgtcaatcgcgcccgcgcccaaaaacaggcgctggacacgtacaaccgcctttctcatgcaattcacacgtttttaggcgcggaggtgcgtttcgccggctccatacccgatgacccgctagtaagtcaagccgtcattgaccaggtgccttttttaataaaaagtcctcaagcaaaagccagcaggtccgtccgtcttctgacggatgtcttgtttcaaacggaagaaaacaaaccaagagaagagaaaccggcatttattgagagattatcttcttttttattgaggaggactttacagtgattcgtgtgcttgtcgttgatgactcagcttttatgagaaagatgattaccgattttctggctgcggaagtgcagatagaagtcatcgggacagccagaaacggggaagaggcgctgaagaaaatagagcttctcaagcctgatgttgtcacgcttgatattgaaatgccggtcatgaacggaacggacacattgcggaagatcatcagcatatataaacttcccgtaatcatggtatcgagccagacacagcaagggaaggaccaaacgatcaactgtctggaaatgggcgcttttgattttatcaccaagccttccggagcgatttcacttgatctttataaaattaaagagcagctgattgagagggtgattgcagccgggctgtcctgcgcacaaaaacctgaggcggcagtgaaagagtcttctatcccggaacgtccggctttggcgggatttgaaagaccgaaagcaaaatccgccaagcaggccgtattcatcgcgacctctacaggcggaccgcgggctctgcaaaaggtgattccgaaactgccgaaggatttaaaggcgcctgtatttgtcgttcagcacatgcctgaaggcttcaccgcttcacttgcagacagactcaaccatttgtcagatattcaggtcaaagaagcggaaaacggtgaagaagcgaaagacggatgggtgtacatcgcgcccggcggaaaaaatatgacggttgcagaggaaggcggaaggctccgcatcattcttgacgttcatgatacggaaagccggcataaaccgtcagccgattatttgtttcggtcggcaagccgcttatccgattacgaaaaggtagccgtcattatgaccggcatgggcagcgacggaaccgagggcgtaaaagaaatgctcagaacaggcggcgttaaaacgattgcggaatcggacgaatcctgtgttgtgttcggaatgccgaagtcagcgataaaggcgggtctcattcatgagattaaacatgtggaagatatcgcggcatccatcaccggatgtgtgaaaaaagagagggtgtgaatcaattggatatgaatcaatatttagatgtctttattgatgaaagtaaagagcacttacagacatgtaacgaaaagctgctgctgttggaaaaagatccggcagaccttcagcttgtgcatgacatcttcagagctgcccatacgctgaaaggcatgagcgcaacgatgggatatacagatctggcgcatttaacccacctgatggaaaatgtgctggacgctatccgcaatggagaaatgcccgttacatcagattggctggacgtgctgtttgaagcgcttgatcatcttgaagagatggtgcagtccattattgacggaggagacggcaaacgtgatatttctgaagtgagtgcgaagctcgacgtaaatgcggtggtgcatgaaactgcggcttcagccgaaacagcagaaccgccggtttcaaaacaacaggcttcaactgaatggaattatgatgagttcgaacggactgttattgaagaggcggaagagcaaggattcagccgctatgaaataacggtttccctgaatgaaagctgcatgctcaaagccgtgcgcgtgtacatgatatttgaaaagctgaatgaagccggggaagtcgcaaaaacgatacccgccgcggaagtgcttgagacggaagatttcggaacggattttcaggtgtgtttcttaacaaagcagcctgctgaagaaattaaagaactcatcagcggcatttcagaagtggagaatgtcgaaatttctgccggtgcgccgttaaaaacggccgaaaaaccgcaagcggctgaaccggtgaaggaagctccggttaaaaaggctgagaaacagcctaagccgcaagcgaaaacggaagaacagccgaagcatcacagcggctcgaaaacgattcgcgtcaacattgaaagactggattcttcaatgaacctttttgaagaacttgtcattgaccgcggacgtcttgagcagatcgccaaagagcttgaccacaatgagctgactgaaaccgttgaacgcctgaccagaatctcgggcgaccttcagtctattattcttaatatgcggatggtgccggtagaaaccgtctttaaccgtttcccgagaatgatccgccagcttcaaaaagaattaaacaagaaaatcgaattgtccatcatcggagctgaaacggagctggaccgcacggtgattgatgaaatcggcgatccgcttgttcatttaatcagaaacagcatcgatcacggcattgaatcgcctgaagtacgggtgaataaaggaaaaccggaatcaggtcatgttgtgcttaaggcatatcacagcggcaaccacgtctttattgaggttgaagatgacggggccggcctgaacagaaagaaaattcttgaaaaagcgctcgagcggagtgtaatcaccgaacgtgatgctgaaacgcttgaagataatgagatttacgagcttatttttgctccgggcttctcgactgccgatcaaatttctgacatttcagggcggggcgtcggcctggatgtcgtaaaaaataaactcgaatcactcggcggctctgtcagtgtcaaatccgcggaaggtcaaggttctcttttcagtatccagcttccgctgacactttcaattatatccgttcttctcattaaactggaagaagagacgtttgcgataccgatttcttctattatagagacggctgttattgataagaaagatatcctgcagacgcatgacagagaagtgattgatttcagaggccaaatcgttccgatcgtctatctgaaaaaagaattcggcattacggattcaaaacaggatgccgatcagttccatgtaatcgtcgtgaaaaagggcgataaatccactgcttttgtcgtggactcttttatcggacagcaggaagtcgtactgaaatcactcggcgactatttaacaagcgtctttgcgatttccggcgctacgattctcggaaacggagaagtggcgctgattattgattgcaatgcgctgatctactaaaacgacacgaggaggtgcccgaatgactgctgaaatcaaaacaggtgaaaaaatgattgtgtttatgataaacgggaaagaatacgctatctcagtttcccaggtgaaatcaattgaaaagtggcaaaaaccgacgagggtcccgggtgtggaatcttatatccgcggtgttatcaatctgcgcggagtgattaccccggttcttgatttaagaaaacgtctgaatcagcctgaacaggacatcacagaagagactcggattatcatcatttcttaccgtgacgccgatgtcggatgggtcgtggatgaggccaatgacgtcatcaccgtgcatgaaaatgaaatcgaatccgcgcctgaaagccagacaaaggaaacggatgtgtggattaaacagatcgtcaagcaagataacaggctcctcaatattatcgatgcgcatgcggtgctggataaaggtgcttcggcatctgcgtccggagagcctaatgcttaaaggggaaaagacaacatgagtaagtttgaagcgatcaaagaagagcagatggatattttgcgggaagtcggaaatatcggggcgggtcactcggcttctgcaatggctcagctgctgaacagaaagatagacatggaagtgccgtttgcgactttattgacatttgatgagcttgctgattttttcggcggggctgaaacgccggtcgccagtatctttttaagaatggaaggcgacatgaccggctctatctttctcatcatgcctttccatcaggcggaacagtttatcagagagctgatcggaaatccggattttgatattgaccagttgggcgaagatcatttgagttcttctgctttacatgagttcggcaatattttagcaggttcctatttaacggcattggctgatttgacaaaacttgagatttacccgagcgtgccggaaatctcacttgatatgttcggcgcggttatcagtgaagggctgatggagctcagccaagtcggagagcatgccattgtcgtggatacttctatttttgaccagggcagccggcaggagctcaaagctcacatgtttatgctcccggactatgattcttttgaaaagctcttcgtctcattgggtgcggctttatgagccgtgcggaagccgcagtcgttaaagtggggattgcggatgttcaagtcgcgcgttacccggataaaatccggacctcgggactcggttcatgcgtggggctggttttatacgataaagacaaacaaacggcaggactcgttcacgtcatgctgccggactccggtttatcaaaaacggcggagctcaaccgtgcaaaatacgcggacaccgccgttaagatgacgattgatatgcttttgaaagccggctgccgcaagtttgccctgaaggcaaaactcgccgggggagcggagatgtttaagtttaaaatgacaaacgacctgatgaaaatcggtccgaggaatgtagcggccatcaaagagcagctttcattgtataacattccggtcatcagtgaagatacgggcggctcaagcggccggacgattgaatttgagccaaggtcctgcatgctgcacattcgaactgttaaacaaggtgaaacaacgatttaataaaggtatgaggtagggggataacaatgcaatccttgaattatgaagatcaggtgctttggtcgcgctggaaagagtggaaagatcctaaagccggtgatgatttaatgcgccgttacatgccgctggtcacatatcatgtcggcagaatttccgtcggactgccgaaatcggtgcataaagacgatctaatgagccttggtatgcttggtttatatgatgccctggaaaaatttgaccccggccgggatttaaaatttgatacctatgcctcgtttagaattcgcggtgcaatcatcgacgggctgcgtaaagaagattggctgcccagaacttcacgggagaagacaaaaaaagtcgaagcggcgatcgaaaaacttgaacagcgctaccttcggaatgtgacgccttcagagatcgcagaagagctggggatgacggagcaggacgtagtatcaacgatgaatgaagggttttttgccaatctcttatcaattgatgaaaagcttcacgaccaggatgacggtgagaatattcaagtgatgatcagagatgacaaaaatgtgccgccggaagaaaaaatcatgaaggacgagctgatcactcagcttgcgggcaaaattcacgagctctccgaaaaagagcagcttgtcgtcagtttattctataaagaagaactgactttgaccgaaatcggacaagtcctgaacctttcgacgtcgcggatttcacagattcattcaaaggcgctgtttaaattaaagcatctgcttgaaaaagtaattcaataatgaactcatggttagcgagtgaaaaacatgtcaacactattatggcttttaagctttgtgcttcacggcgtactgctttatgccgtcattattctgtacacgaggttttcagccctcaaggagacggagcgccagcagaagaagattcttgaagagacggaaaacacccttgcagcgtttctgcttgagctgaaagaagaaaatgaaagactcgaagacgcaaaaagccgtcaagcgccggacgcagaagacgccgaacccctggcggaaccgaaagaagagcctgatattccggaccacatggaaaagctcatcagtgcaacggaacgggctgaaagtgatgaaaacaacggcgcgcattcgtttgaagaacgtgtttcagaattatatgaacaagggctcacccccgcggaaatcgccaaacggatgcagagcggaaagacagaaatcgagctgtttttaaaatttcgcggcaaagctgtaaaggattcttgattgtcgcataaagctgtgttatattatgtcttggtgttaaatacacacgcttaacgatttatgcagagggtgctgcaaacggcagttctgcacaaaaatgacctaagcggaggaaaaaaaccattttattaggaggaaatcacatgtcagttatttctatgaaacaattgcttgaagctggtgttcacttcggccaccaaacacgccgctggaacccaaaaatgaagcgttacattttcacggagcgtaacggaatctacatcattgaccttcaaaaaacagtgaaaaaagtagaggaagcttacaacttcacgaaaaaccttgctgctgaaggcggaaaaatccttttcgtcggcacaaaaaaacaagctcaggattctgttaaagaagaagctgtacgctctggcatgtactatgtcaaccaacgctggttgggcggtacactgacaaacttcgaaacaatccaaaaacgcattaagcgtctgaaagacatcgagaaaatgcaagaaaacggtacatttgaagtacttccgaaaaaagaagttgttcaattgaaaaaagaattagagcgtcttgaaaaattcctcggcggaattaaagacatgaaggatcttcctgatgcattattcatcatcgatcctcgcaaagagcgcatcgctgttgcggaagctcgcaaattgaacattcctatcatcggaatcgtagatacaaactgtgatcctgatgaaattgatgtcgtaatccctgcaaacgatgacgcaatccgcgctgtcaaacttcttacttctaaaatggcagatgctattcttgaagcgaagcaaggcgaagaagaagcggaagctgctgaagagactgcacctgaaacagaaacgacaactgcgtaacctaatcaaaaggtgataagagggactgccttttatcaccttttttcaagaaaaatgtatctatacatatcttgtttacacatataaggaggaattcaaatggctattactgcacagcaggtaaaagaactgcgtcaaaaaacaggcgctggtatgatggactgtaaaaaagcattgactgaaactgacggagatatggacaaagcaatcgaccttctgagagaaaaaggaattgcgaaagcagctaaaaaagctgaccgtatcgctgctgaaggttctactcttattaaaactgacggcaacaaaggcgttatcttagaagtaaactctgaaactgatttcgttgcgaaaaacgaaggcttcaaagagcttctgaacacgcttgctgaccaccttcttgcaaacgctcctgctgatcttgaagaagcaatgggtcaaaagatggaaaacggttctactgttgaagaatacatcacaagtaacgttgctaaaatcggagagaaaatcactcttcgccgttttgctgttatttcaaaagaagacagcgaagcgttcggtgcttaccttcacatgggaggccgcatcggcgtattatccgttcttagcggaacaactgacgaagatcttgcaaaagacatcgcgatgcatgttgcagcggtaaatcctcgttacatttcccgcgaccaagtgtctgaagaagaagcaaaccatgagcgtcagattctgactcagcaagctcttcaagaaggcaaaccggaaaacatcgtagctaaaatggttgaaggccgtctgaacaaattcttcgaagaaatttgcttattagaccaagctttcgttaaaaacccagacgaaaaagtgaaacaagttgtggctgcgaaaaacgcatctgttaaaacttacgtccgctacgaagttggagaaggtattgaaaaacgccaagaaaactttgctgaagaagttatgaaccaagtgaaaaaataatggcggaaagccttggcgaatctttcgcggcttttcaggcagtataggggacactacttgtgttccctatttttaaaactatatttacaaacctttttttctcttgcataataggaaacggcaatgtttacacttggaggttattatggaaaaaccaaaatacaatcgtatcgttttaaagcttagcggagaagcattggcaggagagcagggaaacggcattaatccaactgtcatccaatccatcgctaaacaggtaaaagaaatcgctgagcttgacgtcgaagtggccgtagtcgtaggcggcggcaacttatggcgcggaaaaacgggcagtgacttaggaatggaccgtgcgacggccgattatatgggcatgcttgctactgtcatgaactcacttgccctgcaggacagcctggaaacgctcggaattcagtccagagtgcagacatcaattgaaatgcgtcaggtcgctgagccttacatcagaagaaaagccatccgccacctggagaaaaaacgcgttgttatttttgccgcgggaacaggaaacccttatttctctacggacacaaccgcagcgctgcgtgccgctgaaatcgaagcggacgtgatcttaatggcgaaaaataatgtcgacggtgtgtataatgctgatccgagaaaagatgagtcagccgttaaatacgaaaaattatcttatctcgatgtgttaaaagacgggctggaagtcatggattctacggcttcttcactatgtatggataatgatattccgctgatcgtcttttctattatggaagaaggaaatattaagcgtgccgtaatcggcgaatctatcggaacgatcgtaagggggaaataacgttgtcaaacgaagtattaacacaaacaaaagaacgcatggaaaaagcggttgccgcttattcacgcgaattggcgtcagtccgcgcaggacgtgccaacccatctctattggataaagtgacagtagaatactacggtgcccaaacacctttaaaccagctgtcttccatcaatgtgcctgaagcgcgtatgcttgttgtcacaccgtatgacaaaacggcaatcggcgatattgaaaaagcgattctgaaagctgatcttggcgtaacgccgacaagtgacggcacaattatccgcatcgcgatcccggctctgacggaagaaagacgtaaagaacttgtcaaagtcgtgaaaaaatacgcggaagaagcgaaagtagcagtccgtaatgtccgccgtgacagcaacgatgacctcaaaaaacttgagaaaaacggagacattacagaagacgagcttcgtgcttccagtgaagacgttcaaaagctgacagatgaatatgtgtcaaaaattgacagcgtcacgaaggacaaagaaaaagaaatcatggaagtttaatgaaaaactatgtacaatagataatgtgaaaagaccctctcatgtttacagggggtttttttgttaatactgttgattacattgatcatcagcaacgcaacctttttgggtgacggaggaatctcatgctcaacatactcaaaaattggaagaatcagcagaatgcggcttccaacttagaacggtatacaaaagaagacatactgaagggtgaaattcccgcacacattgccattattatggacggaaacggacgctgggcgaagaagcgctcactccctcggattgcaggacatcatgaaggaatgaaagtggtaaaaagggtgacaaagctcgcaagtcagctcggcgttaaagttctgactctttatgcgttttcaacggagaactggaagcgcccgaagatggaagtcgactttttgatgaagcttccggaagagttcctgaatacgtatcttcctgaattaatagaggaaaatgtacaggtgaaaattatcggagatgaatccgcgctcccttctcatacgtacagggcgattgagaaggccgtaaaagatacagaacaaaatgacgggctgattctcaatttcgctttgaactacggcggacgcacggaaatcgtcaatgcggcaaaagcactggccgaacaggtgaaaagcggcacgctgaatatcgaagacattgatgaagcgctcttttccgggcatttaatgacagaatcaatccaggacccggagctgctcatcagaacgagcggagaaatcagattgagcaactttatgctttggcaggtggcttacagtgaatttgtttttacagatgtcctgtggcccgattttaaagaagatcactttctgcaggcagtgggagaatttcaacagcggggccggaggtttggcggaatttagaggatggtggaaatgaaacaaagattgttaacgggtgttctggcagcggcactatttttatttttggttattttcggaggattgccgttcaccgtatttgtttacgtgatgggaagtatagcgctttttgagcttttgcggatgaaaaagctcagatttttttcttttccgggtctgatcagcctcttgttgttatggctgtatatgatgccggacaagtatcattttttcgatgcgaaaatggaagtaacgattttcgccgtattgattctgctcagctatacggtgctcgtgaaaaacacttttacgtttgacgaagtcgggtttatcgttctcgcgacggtatatatcggactgtgttttcattattttattgaaatcagaaacattgaaacaaacgggcttttgtatatcttttatgcctgcgttgtcatatggtcaacggactcaggcgcatatttcgtcggaaagtcgctcgggaagcggaagctgtggcccgaaatcagtcccaacaaaacggtggaagggtttctcggcggtattgtcatcgcccttatttttacggctgtttttcagctgtttgcgcaccttccgatttcatacccggttcttttggtcatcacgcttgttctgtctgtattcggacagatcggggatttggttgaatcagcgcttaagcggcactatgatgtgaaggattcgggaaaaatccttcccgggcacgggggcattttagatcgatttgacagctttttgtttgtcatgccgttcttatactttctgcttgcgcttttttcatgagaaaggctaatatgaaaataagaccgatctggacgcatagaatgggagtggcattttgaagaatatttgtcttttaggagcaacaggatcaataggggagcagacgttagacgtattgcgcatgcatcaagatcagttccgtctcgtctcgatgactttcggtaaaaacgccgagaaagcgatcccgttgatcagaacgtttcagccgaaatatgtagcagtcggcgacatggatacataccaaaaagtgaaagaagcgtctttttctcatgaatgtcaaatcggcatcggagaagaaggcctgattgaagcggcagtcatggacgaagtggatatcgtggtcaatgcgctgcttggaagcgtcggtttaatcccgactttgaaagcgattgaacagaaaaaaacaattgcgcttgcaaataaggaaactctcgtcactgccgggcatatagtgaaaggacacgcaaaacgatacggtgttcctcttcttccggtcgacagcgaacattccgctatttttcaggcgctgcaaggcgaacagagcaaaaatatcgagcgcctggtcattacggcatccggcggcagtttcagagataaaacacggcaggagcttgagtctgtaacgattgccgacgcccttaaccacccgaactggtcgatgggtgcaaaaattacgattgactcggctacaatgatgaataaaggacttgaagtcattgaggcgcattggctgtttgacattccgtatgaacagattgacgttgtattacataaggagagcatcattcattcgatggttgaatttcacgacagaagcgtcatcgcccagctcggaaatccggacatgagggtgccgattcaatatgcgctgacatatccggaccgtctgcctctgcctgaaactaaaaggcttgaattatgggagatcggaaacctccattttgcgaaagctgactttgaaaggttccgctgcttacaatttgcctttgaatcaggtaaaataggaggaacgatgccgacggttttaaatgcggccaacgaagaagccgttgccgcttttcttgccggacggatttcattcttatcgattgaggacctgattgaacaagcattggaccgccacagcgtaattcaggatccgagtcttgcggatatccaagaagtggacaaagacacccggggatacgttaattcaatactcacataaggtggtatgttcgtgaatacagttatcgcgtttattattattttcggaacgctcgtttttttccatgagctcgggcatttattgctcgcccaaagagcgggaatcctttgccgtgaatttgcgatcggcttcggccctaaaatcttttcatttaaaaagaatgaaaccgtgtatacgatcagactccttccggtcggcgggttcgtccgcatggccggtgaagacccggagatgatcgaagtcaaacccggttataccgtcgggcttctttttaataaagatgacgaagtggaaaaagtcatcattaatcaaaaagaaaaatatcccgacgctttaatgatcgaggtggagacggctgatcttgagcacgaaatgaagattaccgggtacgagcaggggaaagaagatgaactggcgggctttactgtcagtcagacctccttttttatcgtagacggagaagaagtgcagattgcgccttacaatcgacaattcgggtctaaacccgtatggaagcggattaaggcgattgctgccggtccgataatgaacttcatcttagcgtatgtcattctcgtcatgcttggattcattcaaggcgtgccttcgaatcagcctgagctcgggaagctgacagacaatggacgcgcagcggctgccggtttaaaagaaggcgactatatccagagcattaacggtgaaaaaatgaggtcatggacagacatcgtgacagcggtaaaagaaaatcccggaaaaaaaatcgatgtcgccgtcaaacgggacggcaaatcgtttcatatctcggttacacctgaagctgtaaaagatgaaaataaaaaaacaatcggccgcttcggctcttatgcgccgactgaaaaaggcgcgcttgcagcgatcgcctatggcgcgacatctaccgttgatgtcacaaaagcgattctgaccaatctgagcaaacttgtgacaggccagtttaagcttgatatgctttcgggtcctgtcggcatttatgatatgacggatcaagttgcaaaaaccggtattatcaacctattccagtttgcggcgtttttaagcatcaacctgggaattgtcaacctgctgccgataccggcgcttgacggcgggcggctgctgtttttattcattgaagcaatccgcggcaagccgataaaccgtgacaaggaagcatttgtcgtatttatcggcgtagctttcttaatgcttcttatgctggttgtcacatggaacgatatccagcgtttattcttataattgactagtaaaaaatcagaggtgcgaagacatgagacaaagtttgacgcttattccgaccctgagagaagtgccggctgatgctgaagcaaaaagccataagcttctgctgagagcgggatttatcagacaaaatacgagcggggtttacagctacatgcccctggcttacagggtcattcaaaacattcagaagatcgtgcgtgaagaaatggaaaaaatcaacgcggtggaaatgctgatgccggcccttcagcaggctgaaacatggcaggaatcgggcaggtggtatacgtacggccctgaattaatgcgtctgaaagaccgccacggccgtgaatttgctttaggcgcgacacatgaagaagtcattacttctctcgtgcgcgatgaggtgaaatcttataagcgtctgccgctcactctttaccagatccagtctaaattcagagatgaaaaacgcccgcgtttcggcttattgcgcggacgcgaattcatcatgaaagatgcgtattctttccatgcttctgaagaaagtctggaggaaacataccaaaacatgtacggcgcatacagcagcattttcgcacgctgtgaattaaacgtccgtcccgttattgccgactcgggcgcgatgggcggaaaagacacgcatgaatttatggctctttctgaaataggggaagataccatcgcttattccgatggatcctcttacgcagccaatacggaaatggcggaagttgtcatgaacagcgagccgtcagatgaaacacccgaggcattggagaaaattgatacgccgaatgtcaaaagcattgaagagctcgcttcgttcttgcagatcgagccgagcgcctgcatcaaatcaatgctgtttaaagcggatgaccgatttgttctcgtgttagtaagaggcgatcatgaggtcaatgacgtgaaagtgaaaaaccttctgaacgcggaagtggttgagcttgcgtctcatgaagaagtagccgagaaacttggcacggagccgggatttgcggggccgatcggcgctgccggcgacattgagatttatgccgaccaagccgtgaaagtaatggtaaacgccgtttgcggcgcgaatgaaaaagaccgtcattaccgaaacgtaaacatcgaacgtgacgcgtctgtaaaagcatacgccgatcttcgaatcattcaggaaggcgatccgtcacctgacggaaaaggcacgatccgtttcgctgaagggattgaggtcggacaagtctttaaactaggcacgcgttactctgaagcgatgaatgcgacataccttgatgaaaacgggcgtgcgcagccgatgctgatgggatgttacggaatcggcgtgtccagaacgctttcagccatcgctgaacagcatcacgacgaaaaaggcttgatctggccgaaaagcgttgctccgtatgaccttcatattttggcgctgaatatgaaaaacgaagcgcaaaaagagcttgctgaacagctttacggcaaattccaggcggaaggttatgaggtattatacgatgaccgcgctgaacgcgcaggcgtgaaatttgctgattctgatctgatcggccttccgatccgcatcactgtcggaaaacgtgccgacgaaggcatcgtagaagtgaaaatccgcaaaaccggtgaatctgccgaagtttcagtggatgagctttctgaatttatcaagacgaagtaatcaccataacgaatcatacaaaatcatgttaaaatagagaaaaaagaaggtacctcatcacctgcggaggtaccttcacttatgatgttttaagggagggatactgtctgaatggaacagttatcagtaaacagaagacagtttcagattcttctgcagcagcttaatatgacagatgataccttcatgacatactttgaagacggagagattgataaactgacaatccataaagcagaaaaggcctggcatttccaatttcgctttaaggctcttttgccgtatcaaatatatgattcattcatgatgaggttaacacaatcgtttgctcacatcgcccgtgtcacatcgtccgttcaggtcatcgaccctacagtgacagaggagcttgtacaggattattggacacgctgtattgaagagcttgaaggaacctcgccgccgatggtggctcttttgaatcagcagaagccgaagctcaagggaaacaaactgatcgtgaaaacaaaaacagatacagaagcatctgcgctcaaaaataaatacagcgcactgattcagcacagctaccgccaattcggctttccggaactgcagctggataccgaaattttcgtatctgaccaagaagtccagaaattccgcgagcaaaagcttgctgaagatcaggagcgggcgatgcaggcgcttatcgagatggagaagaaggaaaaagagggcgatgaggatcaggcaccgtccggaccgcttgtcatcggctatcaaattaaagagaacgaagaaatccggacgcttgacagcatcatggatgaagaaagaagaattacggtgcaggggtttgtgtttgatgctgaaacacgcgagctgaaaagcggacgcacgctctgtattttcaaaatcacggactatacaaacagcattttagtaaaaatgttcgccagagaaaaagaagacgccgctttgatgaaaacgctgaaaaaaggcatgtgggtgaaggcgcggggaagcattcaaaacgatacattcgttagagacctcgtcatgattgcaaatgacgtgaatgaaataaaagccaaaacccgtgaagacaccgctcctgaaggcgaaaaacgggttgagcttcatctgcattctccgatgagccaaatggatgctgtaacgggcatcggaaagcttgtcgaacaggcgaaaaaatggggacatgaagcgattgcgttaactgatcatgccgttgtgcagtctttcccggatgcctattccgccgcgaaaaaacacggcattaaaatgatttacggaatggaagccaatatcgtagatgacggcgttccgatcgcatacaatccagctcaccgtcttctggaagaagacacatacgttgtctttgacgttgaaacgacaggtctgtccgcagtgtatgacaccatcattgagcttgctgcagtcaaaataagaggcggagaaattatcgataaattcgaagcgtttgccaatccgcaccatccgctgtcagcaacgacgatagagcttaccgggattacggacgacatggtccgcgacgctcccgatgtcgttgacgtcgtccgggattttaaagaatggatcggcgatgacgtgcttgtggctcataacgccagctttgatatgggatttttaaatgtggcgtacaagcgtcttttgaaaacggaaaaagcgaaaaatccggtcattgatacgctggaactcgcgcgtttcctgtatcctgagtttaaaaatcaccgcttaaatacgttatgtaagaagtttgatatcgaattaacccagcatcaccgagcggtttttgacgctgaagcaacgggctacctgctgttgaaaatgctcaaagatgccgctgaaaaagacattttttatcatgatcagctgaatgagaatatgggacaatccaatgcttatcagagatcaagaccttatcacgctacattgcttgccgtaaatgagaccggccttaaaaatctgtttaagctcgtgtccatttctcatattcaatatttctacagagtgccgcgcattccgaggtcgcagcttaataaatacagagaaggtctgttaatcggctctgcctgtgacaggggtgaggtctttgaaggcatgatgcaaaaatctcctgaagaggttgaagatatcgcatccttctatgattatcttgaagtgcagccgccggaagtatacagacaccttctgcagcttgagctcgtccgggatgaaaaagcgctgaaagaaatcatcgccaacattacgaagctcggagaaaaattgaataagccggtcgtggctacgggaaatgtccactatttaaacgatgaggataaaatttaccggaagatcttaatatcttcccaaggcggcgccaacccgttaaacagacacgaactgcctaaagtgcacttcagaacgacagatgaaatgctggaggctttctccttcctcggtgcggaaaaagcgaaagaaatcgtggttgacaatacgcagaaagtcgcttcgatgatcgatgagatcaaaccgatcaaagacgatctgtacacgccgaaaattgacggggccgatgaagaaatccgtgaaatgagctatcagcgcgccagaagcatttacggtgaagagcttcccgaaattgtggaagcgagaatagaaaaagaattaaaaagtatcatcggtcatggattcgccgttatttatctcatctctcataagcttgtaaaacggtctctggatgacggttatctcgtcggctcccgggggtccgtcggttcatcgcttgtggcgaccttaacggaaatcactgaagtgaacccgctcgctccgcactacgtgtgcccgagctgccgatattccgaattctttaatgacggatcagtcggttccggttttgaccttccggataaaagctgcccgtcttgcggcacccctttgaaaaaggacggacatgatatcccgtttgaaacgttcttaggctttaaaggtgacaaagtacccgatatcgacttgaacttctcaggtgagtaccagccccatgcccataactacacgaaagtattgttcggtgaagataacgtgtatcgcgctggaacgatcggcaccgtcgcggaaaagacggcttacggatatgtgaaaggctatgcgggcgaccacaacctacacatgcgcggcgcggagatcgaccgtctggtgcagggctgcaccggcgttaagagaacgaccggccagcacccgggggggattatcgttgtcccggattacatggatatttacgatttttcaccgatacaattcccggcagatgcgacggggtctgaatggaaaacgactcattttgacttccactccattcatgacaacctgctgaagcttgatatattggggcacgatgatccgaccgtcatccggatgctccaggatttaagtggaattgatccgaagacgattccgacagatgatccggaagttatgaagattttccaaggcacagaatcgctcggcgttactgaagagcagatcggctgtaaaacggggacgctcggcattcctgaattcgggacgcgatttgtgcggcagatgcttgaggatacgaagccgacgacgttctccgagcttgtccagatttccgggctttctcacggaacggacgtatggctcggcaatgcgcaggaactgatacacaacaatacgtgtgaactgagcgaagtgatcggctgccgtgatgacattatggtttacttgatctatcagggccttgagccttcactggcctttaaaatcatggaattcgtccgtaaaggcaaaggcctgacgccggaatgggaagaagaaatgaaaaagaacaatgtgccgaactggtatattgattcatgcaaaaaaatcaaatacatgttcccgaaagcccacgccgccgcatacgtgctgatggcggtgcggattgcatactttaaagtgcatcacgcgcttttatattatgctgcgtattttaccgtccgcgcagatgactttgacattgatacaatgattaaaggctcgactgccatcagagcggtgatggatgatatcagctctaaagggcttgatgcttcgccgaaggagaaaaacctccttaccgtgttagagcttgcgcttgaaatgtgtgagcgcggctattccttccagaaggtcgatctataccgttcgagcgcttcggaatttatcattgacggcaacagtctcatcccgccgttcaactcaattccgggactcggaaccaacgccgctctcaatattgtgaaagcgcggaaggaaggggagttcctttcaaaagaggatcttcaaaaacgcggaaaagtgtcaaaaaccattttagagtatttagaccgtcacggctgtcttgagtcgcttccggaccaaaatcagctgtctctgttttaagctttgtgcacagcctccgagcggagtttgatttgcattaaatatatggttatggtatagttttattggaaatgctaacgattaccgaggcaaagagtggggaaacccgctcttttgtattgaacaggcaattttgcctcgacatgtccatcgttttctcaatgcccctgctcttttgaagcagggtttttatgcagaggaacggctgatatgatatcgacagcacaaggaggaaaaacatgagcaaaaaagtgactgataccgttcaagaaatggctcagcccatactggatgaccttcagcttgaactcgtagacattgaatttgtcaaagagggtcaaaactggttccttcgcgtgtttattgattccgagaacggtgttgatattgaggagtgcgccaaagtcagcgaagcgttaagcgaaaagctggatgaggccgatccgatcacccagaactactttcttgaagtatcttctcctggagccgagcgtccattaaagaaaaaagccgacttcgaaaaatcactgggcaaaaatgtgtacatgaaaacgtacgaaccgattgacggtttaaaagtgtttgaaggcaaattggctgaattcgatggacaaactgttacaatagagatgacggtcaaaacaagaaagaaacgggtcaatattccgtatgaaaaaatagctaacgcaagattagctgtaacattttaatgaatgaagtattagtgtttaaggggggagaccgctaacatgagcagtgaactattagatgctctcactattcttgaaaaagaaaaaggcatcagtaaagacattatcatcgaagcaattgaagctgccttaatttccgcgtataagcgaaattttaaccaggcgcaaaacgtacgggtcgatctgaaccgtgagacgggcacgatccgcgtgttcgcaagaaaggatgtcgtagacgaggtatacgattcaagacttgaaatctcgcttgacgacgctcagcacatccatccgaactaccttgtcggagatgtcgttgaaatagaagtaacgccgaaagacttcggccgcattgctgcgcagacggcgaaacaagtggtgacgcagcgtgtccgtgaagctgagcgcggcgtgatttactcagaatttatcgatcgtgaagaagacattatgacgggaattgtacagcgcttagacagcaagtttatttacgtgtctctcggcaagattgaagcgctgctgcccgtcaatgaacaaatgccgaatgagagctataaaccgcacgatcggattaaagtatttatcacaaaagtcgaaaaaacgacaaaagggcctcagatctatgtatcaagaacgcatcctggtctgttgaagcgtctttttgaaatcgaagtgccggaaatttatgacggaacggtcgaactgaaatccgttgccagagaagcgggcgaccgctctaaaatctccgtccgcactgatgatcctgacgttgatccggtcggttcatgcgtcggtcctaaaggccagcgcgtgcaggcgatcgtcaatgaactgaaaggcgaaaaaattgatatcgtcaactggtctgatgatccggttgaatttgttgccaatgcgctcagcccgtctaaagtgctggatgtcatcgtcagcgaagaagaaaaagccacgactgtcatcgttcctgattaccagctttctctggcaatcggaaaaagagggcaaaacgcccgcttagctgcgaaactgacaggctggaaaatcgatatcaaaagtgaaacggatgcaagagaccttggcatctatccgagagagcatgaagaagatgacgatttagagccgctctttatggagcctgaaacagccgaatcggatgaataagaggtgactttaggtgaataagcgaaaaaaaattcctctgcgcaaatgcgtggtaacgggggaaatgaagcctaaaaaggaactgatccgaattgtccgttctaaagaaggagagatttcagtcgatccgaccggaaagaagaacgggcggggtgcctatatcacccttgagaaagaatgcatcttagctgcgaaaaagaaaaacacattgcaaaatcaatttcaatcacaaatcgatgaccagattttcgaagaattgctggaactggcggaaaaggtgaaaaaataacatgtctggaatggaatggtttcccttgctgggtctggccaatcgagctcgtaaggtcgtgtcgggcgaggacttggttataaaagaaattagaaatgcgcgtgcaaaacttgttctgctgacagaagatgcatctgcgaatactgcaaaaaaagtatccgataaatgcaattattataaagtgccttataaaaaagtcgaaagccgcgctgatctcggccgctctatcggcaaggaatcacgtgtcgttgtcgccgtcactgaccaaggttttgcgaataagctgatcagcttgctcgattaatatttttgggggtgaacgaatggctaaaatgagagtttacgaatatgcaaaagccatcaatgtttcaagcaaggaaattttgactgcgctgaaaaacatggatatagtagtaaataaccatatggcaatgcttgaagaaaagaccattaagcagcttgatgcgaaatttaaaaaaggcggcgccggcgttacatctcagaagcctgcggaaacgaacaaaaacaagccgcaagggattaatcagcagcctgctgggaatcaaccaaacaaaattcgagacggaaagaagaatgacgtgcagaataatcaatttaacaaaaacaagaagaataacaacaacaaaaacaaaaacaaacgcaatcataacaacaaaaatcagtatcagcaaaaaccgctgaagccgaaaaaagagcttcctgagaaaattacgttttccggctctttaacagtcggagctttagccgaggaactgggcaaagagccgtctgaactcattaaaaaactgatgcttctgggcgtaatggctaccattaaccaggagcttgacaaagacacaatcgaactgatcgcatctgaatacggtgtagaaacagaagaagtgattgtgcttgaagaaactgagcttgaaaaatatgaagaggctgacaaagaagaagatcttcaaatccgtccgcctgtcgtgacgatcatgggccacgttgaccacgggaaaacgaccctccttgacagcatcagaaaaacaaaagttgttgaaggtgaagccggcggaatcacccagcatatcggggcttaccagatcgaagaaaacggcaaaaaaatcacgttcttagatactccgggacacgcggcgttcacaacaatgcgtgcgcgcggtgcggaagtaactgatattaccattttagtcgtagcggctgatgacggcgttatgccgcagacagtcgaagccatcaaccatgcgaaagcggctgaggttccgattatcgttgccgtgaataaagtggataaagaaagcgcgaaccctgaccgtgtcatgcaggagctgactgaatacggactcgttcctgaagcatggggaggagaaacgattttcgttcctctgtccgctcttacaggcaagggaattgacgagcttgtcgaaatgattctgcttgtcagtgaagtggaagagctgaaagccaatccgaaccgtcaggcaaaaggaacggttattgaagctgagctcgataaaggaagaggatctgtcgcgacacttctcgttcaaacgggaacattgaatgtcggagatccgatcgttgtcggaaatacattcggccgcgtgcgggccatggtcaatgatctcggccgccgcgtgaaaacagccggaccgtccacacctgtagaaattactggcttaaacgacgtaccgcaggctggcgatcaattcctcgtctttaaagacgaaaaaacagcccgttctgtcggtgaagcacgcgcttccaagcaactggaagaacagcgcagcgacaaagcgaagctgagcctcgatgatctgtttgaacaaattaaacaaggcgatgtcaaagacatcaatttaatcgtaaaagctgacgttcaaggttcagccgaagcgttaacagccgctcttcaaaaaattgaagtagaaggcgtaaaagtgaaaatcattcacacaggcgtcggtgcgattacggaatcagacatcattctcgcatctgcttcaaatgcaatcgttatcgggtttaatgtgcgcccagacggaaatgctaagagcacggctgaagctgaaaatgtagatatccgtcttcaccgtatcatttacaaagtcatcgaagaaattgaagcggcgatgaaaggaatgcttgatcctgaatacgaagaaaaagtcatcggccaggttgaagtgcgccaaacattcaaagtgtcgaaaatcggtacgattgccggcggatatgtaacagacggccacattacacgtgacagcggactccgcctgatccgtgacggcgtggtcatcttcgaaggggaagtagacgttctgaaacgcttcaaagatgatgtgaaagaagtttcacaaggatatgaatgtggtattacaattaagaaatacaatgacattcgcgaaggcgacatcattgaagcgtatgtcatgcaggaaatcgaaagaaagtgatcggatttgcggaatgtgaatgcatcatttatgatgcgggatcattaaaggagaaacgagccgttctgaagcggattataacgagggttcagaataagttcaacgtgtcggccgcagaaatcggctatcaggacacttggcagcggaccagcttcggaatcgccgtcgtctcctcctctcacgttcaggcggaaaaggagatccagcgtgtactcgcgtttattgactcctttcccgaaatagaacggacgatcactagaacagagtggttttaacttagaggtgattgaattgagtatgagagcaaaccgtgtcggcgagcagatgaaaaaagagctcggggatattatcagccgaaagctgaaagacccgagaatcggatttctcactgtaacagacgtacgtgtttcaggtgatttacaaatagcgaaggtgtatatctccgttctcggcggagagaaaaagaaagaggaggcgctgaaagggcttgagaaagcgaaaggatttatccgttccgaaatcggcagccgaatcagactccgcaaaacgcctgagcttgaatttgaatttgatgaatcaattgagtacggcaaccgtattgaaacattgattcacgaactgcattcagataaaccgtctgaataacaaggaaagaggatgggcgagtgtcgtctgtcctcttttctgcgttttacgggatacaattgataacaaaggagcgaaagacagatggttaacggagttctccttttacataaaccggtcggcatgacttctcacgactgtgtaatgaaaataagaaaactgttaaaaacaaagaaagtcggacatacgggaacgcttgatccggaagtgtcaggcgtactgccgatctgtgtcggacgggccacaaagattgttgagtacgtcaccgacaagtcaaaaacgtacgatgctgagatcactctcggcttctccacatcgaccgaagaccagactggagaaacggtcagcgtaaaacctgtcaaggagccgctgaaagaagcggatatcaaagccgttttagacgaactgaagggaccgcaggagcaagtgccgccgatgtattccgctgtaaaggtcaacgggaaaaagctctatgaatacgccagggcgggtattgaagtggagcggccgaagcggaatatcacgattgaagatatcgcgctcacttcccctgtcacttataaagaagacacagcatcattccgctttacagtcacgtgctcaaagggcacttacgtgagaacattggcggtgacaatcggtgaaaaactcggctatcccgcgcatatgtcgcatctcatccgcaccgcttccggcgatttcagccttgatgagtgtttcacgtttgaggaacttgaacagcaggtttcagacggcacggttgcagagcatgccgtgccgattgaaagagcgctcaatcatttgccgaaatgggtcataagtgatacattagctaagaaagctgaaaacgggtcagtgtttgacatcccggcggaattttctgcaatgacagctgacgcccgtatagcggtctgtactgaagacggagaatgtgtggccatttatatgccgcatccttcaaaaaaaggactgctgaaaccggctaaagtgctcatgcaaaaaagcgaacaataagaaaaaaggtgaccgttctgtgaagacgatacatatttctcatccgcatcatttacaaaaagaagagcagccggcgtctgtcatggcgctcggctactttgacggcgttcatttgggacaccggaaagtaatcggaacagccagacaaattgccgaagaaaaaggcctgtcgctggccgttatgacgtttcatccccacccttcccatgtgttgggcagggacaaagagccaaaggatctgattacgccgcttgaagataaaatcagccagatcgggcgtttaggcgctgatgtgctgtatgtcgtaaagtttgatgaagcgtttgcgtctctttctccaaaacagtttgccgaggagtatattttagggttaaacgcgcggcacgctgtgggaggcttcgattttacgtacggaaaatacggaaaaggcacgatggagacgctgccggacgatttaaacggcaaggccggatgcacgactgtcgagaaacagaccgagcaggacagaaagatcagctccacttatatccggtcagcgctgcaggatggtgacgttgaacttgcgcacactcttctcggccagccgtattttatccggggcactgtgattcacggagacaaaagaggccgcaccatcggttttccgaccgcgaatgtcggcctgcacaacagctatatcgtgcctccgacaggcgtgtatgcagtgaaagccgaaataaaaggcgaggtgtatgaaggcgtctgcaacatcggctacaaaccgaccttttatgaaaagcgccccgatcagccgtcaattgaagtccatttgtttaattttcagcaggatgtatacggagaagacgttaaaatcgagtggtacaaacgaatccgaagcgaacggaagtttaacggcatcgatgaactgacggctcagatcgggaaagacaaacaagaagcgatccgttttttcagcaaataacggaaaaaacatcaaaagtacacaaattttcttctaaaagatttgcatatgggcgcgatttttagtatcatatgtttcgtagtcttaaaaccattgcttggcaatccgaagtcaccgacggttgctaggtaactggggctaattatgatatggaggtgaaacaggatggcaattactcaagagcgtaaaaatcaactcatcagtgagttcaaaacacacgaatctgatactggatctccagaagttcagatcgctatcctaacagactcaattaacaacttgaacgagcatttgcgtactcacaagaaagatcaccactcacgtcgcggtcttcttaaaatggtaggtaaacgtcgtaatcttcttacgtatctgcgtaataaagacgtaactcgttaccgtgagttaattaacaaactaggcttacgtcgataatcgtaaaaagcgggaggattcccgcttttttatcgtattaaagcgaaaaaaataataataaaaaaacaatgaaatccttttacatactactttgacattgatatgttcaattcatttcgttcataataggagtaattgattatttcacacattaagagaggagctcgtaatcgaatgggacaagagaaacatgtctttaccatagattgggccggcagacagcttacagtagaagccggccagcttgccaaacaggcaaacggcgctgtcatggtccgctacggcgatactgcagtgctcagcacagcaaccgcatcaaaagaaccgaaaccgctagattttttcccgcttactgttaactatgaagaaagattatacgcagtaggtaaaattccgggcggttttattaaaagagaaggccgtccaagtgaaaaggccgttttagccagccgtctgatcgaccgtccgatccgcccgcttttcgcagacggattccgtaacgaagtacaggtcatcagcattgtcatgagtgttgatcaggactgctcatctgaaatggctgcaatgttcggttcatcactcgctctttgcgtttccgatatcccgtttgaaggcccgatcgcgggtgtgacggtaggccgcattgacgggaaattcgtcatcaatccgacggttgaccagcttgaaaaaagtgatatcaacctcatcgttgcaggcacaaaagacgccatcaacatggtggaagccggagcggatgaagtacctgaagaaatcatgcttgaggcgattatgttcggtcacgaagaaattaagcgcctgatcgcattccaagaagaaatcgtcgcagcagtcggcaaagagaaaacagaaatccaactgtatgaaattgacgaagagctcagcgaaaaagtaaaaagccttgcggagccggatcttctcagcgccattcaggttcacgaaaaacatgctcgcgaagacgcgattaatgaagtgaaaaatgcagttgtcgcgaaattcgaagaagaagagcatgatgaagatacgattaaaaaagtgaaacagacactgtctaaacttgtgaaaaacgaagtgcgccgtttgatcacagaagaaaaagtccgtccggacggccgcggcgttgatcagatccgcccgctttcttcagaagtcggccttctgccgagaacgcacggctccgggctgtttacgagaggacagacgcaggcgctcagcgtatgtacattaggcgcccttggggacgttcagattcttgacggtttaggcgtggaagaatcaaaacgctttatgcatcattataacttcccgcagttcagcgtaggggagacaggcccgatgcgcggaccgggacgccgtgagatcggtcacggtgctcttggagagcgtgcgcttgagccggtcattccgaatgaaaaagacttcccgtatacggtccgcctcgtatccgaagtgcttgaatcaaacggttccacttcacaggccagcatttgcgcgagcacgcttgccatgatggacgcaggtgttccgattaaagcccctgttgcgggtatcgcgatgggacttgtgaaatcaggcgagtactatacggtattaacggatattcaagggatggaagacgccctcggtgacatggactttaaagtagccggcacggaaaaaggcgtgacagcgctgcaaatggacattaaaattgaaggcctttcaagagaaattcttgaagaagcgcttcagcaggcgaaaaaaggaagaatggaaatcttgaacagcatgctcagcacgcttggtgaatcaagaaaagaactttctcaatatgcgccgaaaattttaacgatgaacattaatccggataaaatccgtgatgttatcggaccgagtggtaaacaaatcaacaaaatcattgaagataccggtgttaaaattgacattgaacaagacggcaccatctttatttcttctactgatgaaagcagcaaccaaaaagcgaaaaaaatcatcgaagatcttgtcagagaagtcgaagtcggccagctttacctcggtaaagtcaaacggattgagaaattcggcgctttcgttgaaatcttcagcggaaaagacggtctcgttcacatctctgaactagcgctcgaacgggtcggcaaggttgaggatgttgtgaaaatcggtgacgaaatccttgtgaaggtaactgaaattgacaaacagggacgagtgaatctgtcgcgtaaagcagtgctgcgcgaagagaaagaaaaagaacaggaacaacaacaatcttaaatgaaaacctaacaaggagcctgggagacccggcttctttattttgagaaagacaacagacgggttctaccttgtcctcctcatacataatgtgtgaggaggggggaaggacatgttgaaaaaattcgtgccgtttgccgtttttttatttcttttttttgtttcgtttgaaatgttaaaaaatccgtatacagttgattacatagacgcaatgaaaaaagacgctgtaactgtgtcagcatcaaaagatccgctctatgaagaattactgcaaaaagcgtcagagtatgaagtgaagccgcaagacgcgcggattgataaaatatggaagagtataccgggatataacggtttaaaagtcaatgtggaaaaatcctataaacaaatgaaaaaggacggagaatttcacgaagacggccttgtctatgagcaggtaaaaccgaaagtccatcttgattctctcgcgcccgaacccatttataaaggaaatcccgacaaaccgatggtcgctttcctgataaatgtcgcctggggaaatgaatacgtggagcaaatgctgcctattctgaagcagcaccaggtcaaagcaactttctttcttgaagggaaatggctgaaaaacaatcaggagctggggaaaaaaatagcggcagacggacatgaaatcggaaatcattcatacaatcaccctgatatgagcaaactgacttcaggaagcatttccgaacagcttgacaaaaccaatgcacaaatcagcgagacgctcggcataaagccgaaatggtttgcgccgccaagcggcagcttcagaaaagctgtggtcgatcttgcggcggaaaaaggaatgggcaccatcatgtggaccgtggacaccattgattggcaaaaaccgtctccggctgttttacaaacaagggtgttgagcaaaatacataacggagccatgattttaatgcatccgactgatccgactgcgaaaagcctggatacactgattgcaaaaatcaaagaaaaaggctacgcgctcggctcagtgtctgacttaatggatgaaaacaggctgatgaagtagcaggcggcagttgcctgtctttgaataggaggaacagacttgataaaacgctatacatgccaaaacggtgtaagagttgtgcttgaaaataatccaacggtgcggtctgtggcaatcggcgtatggatcgggacgggatcacgtcatgaaacgccggatacaaacggtatttcgcactttcttgagcatatgttttttaaaggaacaaataccaggtccgcacgtgaaatcgcagaatccttcgatcggataggcggccaagtgaatgccttcacttcaaaagaatatacgtgctattacgccaaagtgctggatgagcatgcaaactacgcacttgatgtgctggctgatatgttctttcattctgcttttgacgaagatgagctcaaaaaagaaaagaacgtcgtatatgaagaaatcaaaatgtatgaagacgcgccggatgacattgtccacgatctgctgagcaaagcgacatacggcaatcattcgctcggctacccgattctcgggacggaggaaacgctttcgtcatttaacggcgattctctcagacagcatatggatgacttttacacgccggaccgcgtcgtcatttctgtcgccggaaatgtaacggaacaattcattaaagacgtggagaaatggttcggtacatacgaagcgaagggcaaagcaagcggcatcagcgagcctgagtttcattatgaaaagctgaccagaaaaaaagacaccgaacaagcgcatctctgtctcggtttcaaaggcctgaaagtcggagatccggacatttacgatttgatcgtcttaaacaacgtgctgggcggaagcatgagcagccgtcttttccaggatgtgcgcgaagataaaggactggcctattctgtatacagttatcacagttcctatgaagacagcggtatgctgacgatttacggaggcaccggcgcgaatcagctcggacttctgtctgaaactattcaggaaacgttatcggttctaaaacgtgacggtatcaccccgaaagagctggaaaacagcaaagagcaaatgaaggggagcttaatgctcagcttagagagcacaaacagcaaaatgagccggaacgggaaaaacgaactcctgctcggaaagcataagaccatggatgaaattatcactgaattaaatgcggtcagcctggaaagcgtcaacggcctcagccgccgcttatttacggatgattacgcactatcgctcatcagcccgaccggcaatatgccggcctcgtcttaatcggaaaagcagtctgcctctatacggggcaggcatttttttttgctccgggtcatatagtacaagggggtggctatcatgaggctcagtgaactttcaggtaaagaaattgtggacattaaacgggcagagcggctcggcgtgctcggccagaccgatttggaaattaatgaacaggacggacaaattaccgcgctgttgataccgacggtaaaatggttcggattgcgaaaacaaggccacgacatccgcgtcccctggaaccatatccaaaaaatcgggtcagacatgatcattttagacgttccgggggagatcacgcctcccgaagagtagatcttattcattttttgcaagcaccggctcatacagccggtgcttttttcatgaaaaagaacgctgtacattcaccgccctttctctttgcacatacgatgaagaggaggatgacacttaaaagatccagtaactgtaaagaaggtgaacgtttcagatgttaaccggattgacaattgcgatcattggcggtgacgcaagacagcttgagattataagaaagctgacagaacagcatgccgatatttatcttgcagggtttgaccaattggatgacggttttacaggaaccgtcaaatgcaaaattgatgagattccctttcaaaaaatagacagtatcatcctgcccgtatcggcaacgaccggagaaggcgttgtttccacggttttttcaaatgaagaagtggtattaaagcagagctatcttgagcggacaccggagcattgcgtcatttattcaggcatctccaacgcgtatcttgaggggatcgccagcgaagccggccgcaaacttgtgaaattatttgaacgggacgatatcgcgatattcaactcgattcccactgttgaaggaacaatcatgatggcgattcagcatacggattataccattcacggatcaaatgtcgccgttctcggcatggggcgcaccggtatgacgatcgcccggacgtttgcggcgttaggagcgaaggtaaaagtgggcgcgcggagttcggctcatttggcccgtataacggaaatggggctttttccttttcaacttgaagagcttactgaacatgtaaatgatattgatatctgcattaacaccgtaccgagcttgattctgaatcaaagcgttttatcacgcatgacgccgaagaccttgattttggatttagcatcccgtccgggcggaacggatttcaaatatgctgaaaaacaaggcattaaagcgctgcttgctccgggtcttccgggaattgtggccccgaaaacagccggacagattattgcgaacgtattgagcaagcttttggcagacttaaagaaagaggggaaataaccatgtctctgaaagggaaaagaatcggattcggattaaccggctcgcattgcacatatgaggaagtttttccgcaaatagaggcgcttatcagtcaaggagctgaagtccggccggtcgtgacatcaaccgttcaatcgaccgatacccgctttggggaggggggagattgggtcagaaaaattgaagaagcaacaggctttgaggcgattgattccatcgtaaaagcggagcctctcgggccaaaacttccgctcgactgcatggtcatcgcccctttaaccggaaattcaatgagcaaactcgcaaatgcgatgactgacagccccgtccttatggctgcgaaagccacgatccgcaacggccgcccggtcgtgctcggaatttcgacaaacgacggactcggtttaaacggaacgaacttaatgaggctgatgtccgcaaaaaacatatatttcatcccgttcggccaggacgaccacgtgaaaaaaccgacatcgctcgtcgccagaatggatctccttccgattacggtagaaaaagctcttttgcaccagcaggttcagccggtgctcgtacaccaccatgaataaaaaatcatgatgacagaaaatcattccggaataaaaaaattcgatcaatccgtgactattctatggtaaaataaaacgtaaaatgcaaagtcaattcaacaaatgatgcttaattggcggaaggagttttacagatgggaagaggattacacgtagcagttgtcggagcgacgggagccgtaggacagcaaatgctgaaaacactggaagacagaaactttgaaatcgaaacactcacactactatcctcaaagcgttctgctggtacgaaagtaacgtttaaaggcgaagaatatacagtgcaggaagctgttcctgaaagcttcgaaggcgttcatatcgcgttattcagcgccggcggaagcgtatcacaaagcttggcgcctgaggctgtaaaacggggagccatcgtgattgacaataccagcgcattccgtatggacgaaaatacaccgctcgtggtgcctgaggtgaacgaaggtgatctgcacaaacataacggcattatcgccaaccctaactgttcaacgattcagatggtggctgcgcttgaaccgatccgcaaagcgtacggattgaaaaaagtcattgtatctacttaccaagctgtgtccggggccggcaatgaagcggcgaaggaattgtacagccagacaaaggcgattttaaacaatgaacccgcagaaccgtccattatgccggttaaaggcgacaaaaagcattatcaaatcgcatttaacgccattccgcaaattgataaattccaagataacggctatacgtttgaggaaatgaaaatgattaatgaaacgaaaaaaatcatgcatatgccgaatctggaagtggctgcgacatgtgtcagactgccgattgaaacagggcactcagaatctgtttacattgagcttgaccgtgatgacgcaaccgttgaagatatgaaacagcttttaaaagaagctccgggtgttacgcttcaggatgatccggcggagcagctttacccgatgcctgctgattgcgtcggcaaacgcgatgtatttgtaggaagaatccggaaagatttggacagagcaaacggttttcatttgtgggttgtttctgataacctgttaaaaggcgccgcttggaactcagtccaaatcgcggaaagcctgcaaaaactgaacctcgtataaacaaacgtattttctataggcgaacagaagagagtaaggctctgcctgctctcttctgttacgtcagactaatttggagtgaaaatagtgaagatcattgttcaaaaattcggcggaacatccgtaaaagatgacaaaggccgcaagcttgcgctagcacacattaaagatgccatcagtgaaggttataaagttgttgttgtcgtatcggcgatgggaagaaaaggagacccgtacgcgacagattctttaatcgggctcctttacggcagccagtccgacatttctccgagagagcaggatatgcttctgtcttgcggagaaacgatttcgtccgttgttttttccagcatgctgaaggaaaacggcataaaagccgcagctttaacaggagcccaggccggctttttaaccaatgcccagcatactgacgccaaaattatagaaatgaaaacagagcggcttttcgctgcacttgccagccatgacgctgtcgttgtcgcgggatttcagggagcgactgaaaaaggcgacacgacgacgatcggcagaggaggaagcgatacttcagcagcggcgctcggcgcggcggtagatgctgagtttatcgacatttttacggacgtggaaggcgttatgacagccgatccgagaatcgtggaaaatgctaagccgcttccgaacgtcacatatacggaaatctgcaaccttgcctatcaaggcgcgaaagtcattcatccgcgcgcggtggaaatcgccatgcaggcaaaggtgccgatccgcgtgcgctccacttattcaaaagacaaaggcactttggtgacgtcccatcattcgtctaacatcggcagcgatgtattcgaacggctgatcacggggatcgcccatgtgaaagatgtgacgcaatttaaggtccccgccaaaatggggcaatacaacgttcagactgaagtctttaaagcaatggcaaatgccggaatcagcgtagatttctttaacattacgccgagtgaaatcgtatataccgtagccggcagtaaaacggaagccgcgcgcagcattttggctgaattaggatatgagccgacagtgacggagagctgtgcgaaagtgtcagcggtcggcgccggaataatgggtgttccgggtgtcacgtcaaaaatcgtctccgcactttctgataaaggcattccgattctgcaatctgccgacagccatacgacgatctgggtgctcgttcatgaaaaagatatggtaacggccgtaaatgcgctgcatgaagtgtttgaactttcaaagtaaatgtgattgaatcatgatgaggtgaaaaaaatgaatgtcggaaatatatctacagcgatgattaccccctttgacagtaaagggaatgtagactttcaaaaactgtctacattaatcgactatttgttgaaaaacggcacggattctttagtcgtcgcaggcacgaccggcgaatctccgacactttcaacggaagaaaaaattgcactctttgaatttacagtcaaagaagtgaacggacgcgtgcctgttattgcgggtacgggaagcaacaatacgaaagactccattaaactgacaaaaaaagctgaagaagccggcgtcgattgcgttatgcttgtcacgccgtattataataagccttcccaagaggggatgtaccgtcattttaaagccattgcggaagaaacgtctcttcctgtgatgctttacaacgtgccgggcagaacggtcgcttcgcttgcgccggaaacggccatcagacttgcggagataccgaatatctctgcgattaaagaagcgagcggcgatcttgatgccattacgaaaatcattgccgaaacaccggaagatttttacgtctattcaggtgatgacgggttaacgcttcctattctcgcagtcggcggaagaggagtcgtgtcagtggccagccatatcgtaggttctgacatgcagcagatgattaaaaactatacgaacgggcagacggcaaccgcggcactgattcatcagaagcttctgccgatcatgaaggagctctttaaagcgcctaatccggctccggtcaaaacggcgctacagctgaaaggccttgatgtcggatctgtgcgtcttcctcttatcccgctgaatgaagatgaacgtctgagcctgagcagcgtcatcagcgaactgtaagaaaaaatttatacagttaaaatacgcggtcattctcatttttatcgtgagtttgaccgttttgtatacatattggttttccctaaaccttccgcttcttcttgttttctaaaattgatatcagttataataggaacaagtgatgatggacgggtatgagactaggaggatacagattttgaaaaagaaaaatacagaaaacgtcagaattatcgcccttggcggcgtcggagaaattgggaagaacctatatgtcattgaaattgactcagacatatttgtagtggatgcagggctgatgcaccctgaaaatgaaatgctcggtattgatgtcgtcattccggatatttcctacttagtagaacgggctgaccgcgtgaaggccatctttctgacacacgggcacgatgaaaacatcggaggcgtcttttatttattgaacaagctgtcggtgccggtatacggaacgaaacttacgcttgcattactgagagaaaaactcaagcagtacgggcataatcgaaaagctgatttgcgtgaagttcactctaaatcagtcattacatttgaatcaacgaaagtatcgttctttaaaacgattcacagtattccggattcagtgggagtcagcttcaaaacatcacttggctctattgtgtgcacgggagacttcaaatttgaccagacgcctgcttatcaccaatcatgtgatattggcgaaattgccaaaatcggaaacagcggcgtgctcgccctgctttctgacagcgccaatgcggagcgcccggggtatactccgtcagaagcatatgtaagcggtgaaatttccgatgcgatgaacaattcagaaaaccgtgtcatcattgctgtattcgcgtctaatatcaaccggatccagcaagtgatacaggctgccgtccagaacggccgcaaacttgcaatcgccggaaaaaatctgcaaaacgtgcttcagctggggcgcaagctcggctatattgaagccgaagatgaaatgtttattcctgtgcaggatgtgaaaaaatatccgaagcgggaagtggcaattgttacagccggaagccatggtgagccgctggccgctcttacgcggatggccaagcaggcgcacaagcagcttaacattgaagaaggagacaccgttgtcattgcatcaacaccgattccggggcatgaattgatatattccaaaaccgtcaacctgcttgcccgcgccggcgctcaagtcattttcgcccaaaaacgcgtgcatgtgtccgggcacggttcgcaggaagaattgaaactcatgcttaatttgctgaaaccgaaatatttaattccggttaacggtgaattcagaatgcaaaaagcgcattccaaaatcgcagaagagatcggcatgaaacgcagcgatattttcttgattgaaaaaggtgacgtcgttgaattccgcggccagaatgtgaaaatcggggataaagtcacgtacggaaacgttctgattgacggcctcggagtcggcgacatcggcaacatcgtgctgagagaccgccgcttattgtcacaagacggcattctcatcgtcgtgatttcactcgataagcagaaaaagaacctcgtatcaggtcctgagatcattacgcgcggtttcgtgtatgtcagagaatcagagggtctaattgtacaagctactgagctcgtccgctctatcgtgactgaagcgacggaaacatctgccgtagaatggtccacgctgaaacaagccatgcgtgatgcgctgaatcaattcctttatgaaaaaacaaaacgcaagccgatgatcattccgatcattatggaagtataatgtatacaaagccggagcgcatgatgctccggctgtgtttttgttcatgtcccggatggaaatcatcatctttgttcataatacaaagagacattcggaaagggtgaaagataaaatggatcatcgtatggaaaacaccgaagaacagcagcccgaaaaatcagatgcgaaagacagcattatgagcaaaattcagcagctgggagagacatctctgccgcaaatgtcccaagataccaatattcactgcctgacgatcatcggccaaattgaggggcacgtccagctcccgccgcaaaataaaacaaccaaatatgaacacgtcattccgcaaatcgtcgccattgagcaaaatccgaaaatcgaaggacttctgatcatcttaaacaccgtcggaggcgatgtggaagcggggcttgcgattgcggaaatgctcgcatccttatcaaaaccgaccgtctcaatcgtactcggcgggggacactcgataggtgtgccgatcgccgtgtcatgtgatcatagttttatcgcggaaacagcgactatgaccattcaccccgttcggcttacaggtctggttatcggggttccgcaaacatttgaatacttggacaaaatgcaggagcgggtcgtcaactttgtgacccatcattcaaatatttccgaagaaaaattcaaagagctgatgttttcaaaaggaaacttaaccagggacatcgggacgaacgtagtcgggaaagatgcggctgattacggattaattgatgccgtgggcggcgtcggacaggcgataaaaaagctgaaccagctgattgaggaacgaaagggcgaggaaggaaggatgattcaatgatcctttataccgtcatgccccaagaagtcgtttacggtcaggatatagagcaaagcgtgcatgaacaggtagattacgccggcgtgccgctgctagttgagatgaagggaaatgaagctgaagtcgtacagattttaagtacgaacccgatggatttcttgaatccggacatcgctccgggacaaaaaatcaagctgaaaatctaaccggcattcagtccgtttctcgggggcaaaatatgctataataggggaatcctacagaaaaatgcagccggcaaaaggctgcttttcttcatgatgtatgattttacattttttaacgcagtaaggtgatgagtgtggcaaagaaaaaacggaaatctaaaaagaaacaagagagtaagctcaatctaaaatacgaactaagcggactgctctgtgttgcaatctcaattattgctgttttgcagctcggcgttgtgggacagacatttgtgtacttgttccgtttttttgccggagagtggtttattttatgcttaattgcgctcttccttctcggaatttcgctgttttggaaaaagaagagtccaagccttttaacgagaagaaaggcaggattgtactgtattatcgccagtatattgctgctgtctcacgtgcagctctttaaaaatctgtctcatcacgggtcgattcggtcggcaagtgtcatcggcaacacgtgggagctgtttatgattgacatgaaacagcaggctgcttcccctgatttgggcggcggcatgatcggcgcggtactgtttgcagcttcccactttttatttgcatcaacgggttcacagatcatggcgatcgtgctgatcttaatggggctgattcttgtaacgggccgttcactgcaggaaacgctcaaaaagtggacgagccccgtcggccggtttatccgcggtcaatggcaggcatttcttgaggatatgaagacggtcagaacgaatatgtcttcgccgaaaacaaaaacaaaatcgggcaaaaaacaaaaacaggttcaaaagaaaaaagaagagcctgaaccggaggaagaggatgaggaaatcatttcgccgatcatccattcagagccgattatttcaagcttttcagaccgtcaggaagagccctccaaaccgctgattccggaaaaaacgcaggaggctgcacaagcggcaaaagatgagccttccggcggcgctcaagacagtggcgaaacggctgcggctccgccgatgacgtttacagagcttgaaaataaagattatcaaatgccttcattggacatactggctgacccgaaacataccggccagcagaccgataagaaaaacatttacgagaatgcaagaaaactcgaacggacttttcaaagcttcggcgtaaaggcgaaagtgacgcaggttcatctcggtccggcggtcacaaaatatgaggtgtatccggacgtcggggtcaaagtcagtaaaatcgtgaatctgagcgatgacctcgcgctcgcgcttgccgcgaaggatatccggatcgaagcgccgattccgggtaaatcggcaatcggcatcgaggtgcccaatgctgaagttgcgatggtttcgttaaaagaagtgcttgaatccaagctcaatgacaagccggacgcgaagcttctgatcggcttgggacgaaatatttccggggaagccgtgcttgccgaactgaacaaaatgccccatctgctcgtagcgggggcaacgggaagcggaaaaagcgtctgtgtcaacggtattattacgagcattctgatgagggccaaaccgcatgaagtgaagatgatgatgattgacccgaaaatggttgagctgaatgtgtataacggcattcctcatctgcttgcgccggtcgtgacagatccgaaaaaggcctcgcaggctttgaaaaaggtcgtcaatgagatggagcgccgctatgagctgttctcccatacgggtacgagaaatatagaaggctataacgatcatattaagcggtcaaatgccgaagaagaagtcaagcagcctgagctgccgtacatcgtcgtcatcgttgacgagcttgccgatctgatgatggtcgcttcttccgacgtggaagattcaattacgagactttcacagatggcgcgggcggcgggaattcatttgattatcgcgacacagcggccttcagtcgacgttattaccggtgttattaaagccaacatcccgtcaagaatcgccttcagtgtctcatctcagaccgattcacggacaattttagacatgggcggcgctgaaaagcttctggggcgcggagacatgctgtttctgcctgtaggcgcaaataagccggtgcgtgtgcaaggggcattcttatccgatgaagaggttgagcatgtcgttgatcatgtcattacgcagcaaaaagcgcagtaccaagaagagatgattccggaagaagtttcggaaacacacagtgaagtaacggatgatctctatgacgaagcggtcgatttgattatcggcatgcagacggcatcagtctccatgctccaaaggcggttcagaatcggatatacgagagctgcccgtctgattgacgcaatggaggaacggggcgtcgtcgggccgtatgaaggaagcaaaccgagggaagtactattatctaaggaacaatatgatgagctctcttcttaaaaaggagagagttttcactgaaaatgatatcaccaaaatcattcctatttatttttttattaaaacatgatatagttgtcccaattgttcaataatttatgaaagtggtttacggaggggaaacatgtctacaaaagctgacaatcgtcacttgtatctaaaagtgattgagcgaatcaaagaggatatacaaaacggaatttacaccgaaaaggaaaagcttccttctgaatttgagctttcaaaatcaatgggtgtcagccgggcaactctgcgtgaagctttgcgtatccttgaagaggagcatgtgattatcagaaggcacggtgtgggcactttcgtccatacaaaaccgctgtttctttcaggtattgaacagctcaacagcgtgacgaaaacgattcagcaggcgaacatggtgccgggtacgatttttttgtcgtctcaggtcatcacgccgtctgatgaagatatcgctagattccggcttgagcctgagcaggagcttttttatttggaacgcgtgagaacggcaagcggcactccggtcgtttactgtttagatacgattccgatgcacattctgccgaattctttctgtcatgaacaggagtctatttttgatcttttggaaaaaaactccgggtctgtgatcagctatgccgttgctgatatcgaaccgatcggatatcacgatacgatttcaccggttttggaatgcgagccggagacggcgcttttattgctgaagcaaacccactataatcagaatgatgaacctgtgctgtattcattaaattatttccgggctgataagttcagttttcatgttgtaagaaaacgtttttaagacagacgcgtcatgtgtctgtttttttatttgccgtttcagtacatactttgttttctgcaaggcacaataaaacaggaaacaaccaagtatagtgaatgggtgaataagttgagtaagaagaaaaatggaacgaaaaatatcattgctctggcttctgtaccgctcgtgatgacactcgggaattccatgctgattcctgtgcttccgatgattgaaaagaagctgtccatatcgtcttttcaagtatcgttaattataacggtctattcgattgtggcgattatttgtattccgattgccggatatctgtccgataaattcggaagaaaaaaggttcttctgccttgtcttctcatagccggtgcgggcggagcgcttgccgcgatagcttccaccgcgttcaagcatccttatcccattatcttggcggggcgggtgctgcagggaatcggttcggcaggggcggctcctgtagtgatgccgtttatcggtgatttattcaaaggggatgatgagcggattaccgcggggctcggcgatattgagacgtctaacactgccgggaaagtaataagcccgattctcggttcgctcttggctgcatggttttggtttatgccattttggttcattccgtttttttcgctcatcagtttttttctcgtattgtttttggtggcaaagccggaggaacaaaaagaagcgccttctatttccgaatttgtgaaaaatgtcggccgcatatttaagcgtgacggacgctggctctttacggtttttatcatcggctgcgtgattatgtttttgctgttcggggttcttttttatttatcagactcactggagaagaaatacggcattgacggtgtggctaaaggagcgcttttggcaatcccgcttttatttctatccgtcagttcatatatagcaggcaggaaaatcggaaaagaccaaggcaaaatgaagttttgcatcgttttcggaatgagtgccgtgacactgtcgtttatcggcctatggtggaatcacagtttttatttattatttatctttttgtgtgtcagcggtatcggtatcggaatggcattgccggctttagacgctgtcatcacagaaggcgtagacaacgaggaatcgggaaccatcacctcattttataacagcatgcggtttatcggagtagcggcgggaccgccgatctttgctgccctgatgtcaaatgcaggctggctgatttttattttatccgctttttgcggcattgtgtctgtatttttagcgctgttaaatatctcatcacaagcaaaagaaaaaaaggaatcattaaagacggtgtaatctgcactgtcttttttttattttattttgaagattgacatgataccgtcaagtcgttatcctttttaatagttaaacatattaactatcggaaggagggggaaaaggtgcatgaagaaaaagtaaagcagctgattcagcgttattccgatgtatacctgcacgtcttaaaaaaaattgacagcattatcgctgaaaaagtgaacaaagaactgacattggatcaatattacatcctccgctatattatgctcaatcccgattgcaaatcaattgaactggccgcggtgtgccacgtcaacaaaagcgccattacatctatgacgaaccgcctgtatgaaaaaggctacatcaatagagaacgcagccaaagcgaccgccggagcatacttttaaatgtcacggaaaaggggacggaagtatttcaccgtgtggagcggcggattgaggaactcgtccgatcatatattatgtattttgatgaagacgaggcggagatgttcgtgaatacatatgaaaaattatatcgattgatgatgactgaggaggatcagcagacataatgaaaaacattatccgagcccgctggatcatcgccgcggtgtgggtcgccgcaacggtgatatttatgcttacagcgcctgatatggctgaattgacacgggagaaagggcagatttccgtaccggacggatattcctcttcttacgcccatgaattgcttgatgaaatgtctgattcagatgcaccgtcttcttctgccgtcatcgtattccacgaaaaaggcttaatgacagacaaaaaagatcgtctggaagaagccgtcagcactttgtctgaacataaaaaagcgcttcagattaaaacggtgacttcatacttcggggagaaaaatgacgacattaaaaaacagctgctctcaaaagacagacaaacgatgctcgttcagctgcagcttgatacatccaaaaacgatatcatcgaaataaaaaataaaatagataaagagctgaaaccgtacggcgtatcatacggcattacaggccaatcgctgatcgacgaagatgtgttaaaaagctcacaggacggcttgaaaaagactgaatatataacggtcgcttttatcctgatcgtgctgatccttgtatttcggtcagtggtcgctccgttcgtgccgcttttatcagtattgatatcttatttagtcagccagtcgattgtcgcatttttagtcgatcagctgaattttccgctctcaacttttactcagatttttatggttgcgattatgttcgggatcggcacagactactgcattctgcttctcagcagatttaaagaagaactgtcgcatggcgctgatataagagaagcgatcgtcgtcacctacaaaacggccggaaagacggttttgtacagcggcggtgcggtgctgatcggatttgcctgcatcggatttgcgacatttaagctgtatcagtcggcagcagccgttgcggtcggtgtcgcggtgctgctgcttgcgctcatgacgatcgtgccgttttttatggctgttttaggaaaaagcctgttttggcctgttaagggcgatatttcgcatcctcaaagcaaagcatgggaaacgtcagggcggttttcatttaaaaggccgctcatcagtcttgcaatcgttgcggtattcaccgtcccgcctatccttctttacaaagggtcgctgtcttacaacagtcttgacgaaatcggggataaatatgaatccgtccgcgcgtttcatacgatttcagacgccttcggcccgggagaacttcttccggccacagtcgtcatcaaaaatgatgagacattaaataccgaaaaacacctgattgatatcgaaaaaatcagcagagaacttgaaaaaacagagggtgtaaaaacggtcagaagcgccacgcgccctgctggaaacggattgaatcaattatttgtcacaaatcaggcaaagcagcttcaagaagggcttgataaaggcaatacaggacttgaaaaaatcacggacggattagggcatgccgcaaagtcgttagctgattcacagccgcagatcgaagagtcggggaatagcgtcaatcagcttattgacggaacattgtctctgaaatccgggctttctgatataggagaaaacctgaataaactgcaggctggcgtgaacgagaataaagccggcgtcgcccagatgagaaagcagattgaagagcaaaaacaaatgctgacttcacagctcaaacaaaacagcggtctcgcttcagaaacgcaaaacgctttaaaatcggtaaaaaccgtcctgccgatgaaagatgaagccagcagacagcttgccgatttgaacaagcagcttgcccggctgccgtttgcaaaattggaagcgtcaataccgtcagtcaaaaccgatccctcttaccaagaaatcaaatcagcctttacgggtgtacagtcagccgtttccaaggcaaacgcggatgcagaagcgttttctaaacaggtcgacagtcaaaaggctcatctgcagcaagcggaaaaacaatttgcccgactggcagccgctcagaagaagattgacactcaaattaacgcaatgatcaatggtctgaccagtattgaaaacggtctgcagcaagtgtcagacggacagggggctctcgcgggacaaatgccgcgccttgaatcggcggcaggacagctcgcggagggccagaaaaaaatgaagagcggccttggtgatttttcttcccggctcagcgatctttcttcaggccttaacgatagtgtaaaagggcttaagaaagtatcaagcggcatgatgggggcgaatgattacctgggtgagcttcacaaggcgtcagacaaagaaatgacaggctggtttgtgccgaaagacgcgttgacaaacagtgatttcacaagcgtgtttaatacgtacatgtcagatgacagaaaaacgacagaattgaccgtcgttcttgataacaatccttactcaaatacggccattcaagatattcaagcgatcaaagcgagcgtaaaaagagccattccgaacacggatctgaagaatgcttccttcggcgtttcgggagtctccagcatgaatgccgatctgaaggaagtatcggattcagacttcaaacggacggccatgtttatgctggcgggaatttttctgattctcatcgtgatgctgcgctccctcattatgcctgtttatttagtggcgtcgctcgtactgacgtatttcgcatccatcggcgtgacggaatacatctttacacacttcttcgggtacccgggcgtaaactgggccgtgccgttcttcggctttgtcattttgatggctctaggcgtagattattccatctttttaatggaccgctttaatgagctgaaaaaagaaggaacggaacccgcaatgatcagcagtatgaaaaatatgggttccgtcatcatttctgcggcgattattttagcgggaacctttgcggccatgctgccgtcaggcgttctttccttattacagattgcaaccgtggtattaacaggccttctcatgtacgcaattgtcgtccttccgttttttgtaccggtcatggtgaaaatattcggaagcgccaactggtggcctttcaatttgaaaaaataacgttcaatgcctctgcctgttttcgggcagaggttttttgtttccttataaatcctccagttgatataattacatctgcgcactcttttttgcgaatgctgaaatttggtcataatacatactatgaaagaatgaacgaaggaggtttcacatgacttacgtaaatgaaatgaagtcaaagcacggcgggatcaccgcccacatcgtaaagaccgagaaatttaaaaccgtttcgctgacgtttaaaatgctggctcctttaacgaaagagctcgtaacaaaaagggcgctgtttccgcatgtgcttctgcgcggaacagaaagccgcccgaaaaccgctgatctgcggtcttattttgatgaactgtacggcacatccgtttcagctgatctgacaaaaaagggagaacgtcatgtcattacgttcaggcttgagattcctaatgaaaagtatctgaaggaccgcacaccgttattggaaaaaggccttcagcttttatcagagcttgtcttttcgcccgctttggaaaacggcgccttcctgcccctttatgtcacgcaggaaaaacggacgctgaaacagcggattcaagccgtatatgatgataagatgaggtattctaatctgcgtctcgttcaggaaatgtgcaaaagcgaaccgtatgcccttcacgtcaacggcgagttcgatgatgttgaacacattacaccgcaagatttgtatgaagcctatcaaaaagccatacgcgaagatcagctggacctgtacgtcatcggcgatgttgatacagatcaggtgaaaacggccgttgatacgtattttaaaacggaagaacgggagcttcagccttttgaaagaagcgcggcgaatgagcagcccgatccgaaggaagtcattgatgaagaggacgtcaagcagggcaagctgaatatcggattccggaccaatacgacatatacagatccggattatcctgcattgcaggtgtttaacgggctgttcggaggtttctctcattcaaagctgtttataaatgtccgtgaaaaagcgagcctcgcctattatgcagcctcaagggtggaaagcttcaaagggcttttgatggtcatgtcgggcattgaggtgaaaaattacaagcaggccgtcaccatcattgaagaacagtttcaggctatgcaaaacggtgacttttcagaagatgatatcgcccaaacgaaagccgttattaaaaatcaagtattagaaaccattgatacggcatacggcttagcggaatttctgtatcagcaggcctcagcccaagtagagataccgatcgaaagattccttgacaatatcgagaaagtgacaaaagaggacattatcaatgtcggaaagaacattaagctggatacgacttatttcttaaaagggacggggggagcatcttgactaaaccgataaacttcgaacagcttcaggaaacgctgtatcatgaaaaaatggcaaacggccttgatgtctatgtgctgccgaaacagggctttaataaaacatacgccgtgtttacgacaaagtacggttccattgacaatcaattcgttcctttaaataaggaagaaatggtacacgtccctgacggaatcgcgcattttctggagcataaactgtttgaaaaagcggacggcgacgtgtttcaggacttcagtaagcagggggcgtcggcaaatgcctttacatcatttacacgaaccgcttatcttttctccagcacttctaatgtggagaaaaacctggaaacactcgtagattttgttcaggacccgtatttcacggaaaaatcagttgaaaaagaaaaaggcatcatcggccaggaaatcaatatgtatgatgataatccggattggcggctgtttttcggccttatcgaaaatatgtataaagaccaccccgtgaaaattgacattgccggaacggtggagagcatctcacatattacgaaagatctgctgtatgagtgctatgaaacgttttatcacccgagcaatatgctgctctttatcgtcggtcccgtagatcctgaagcggtcatcagccaggtgcggaaaaaccaggagaaaaagccgtttacagaccagcccgaaatcaaacgtgaagaagttcaggagcaggaagcggttttccgccgggagcaggaattaaaaatgaacgtgcaaggctcaaaatgtcttgtcggcttaaaggcgaaagatccttataaaacggggcaggatctgttgaagcacgagctcagcatgaacctcatgcttgaatgtcttttcggaaaaagctcaccgcattacggtgacttgtacgacaaaggctacattgatgaaaccttcagctttgattacacggctgaatacggattcggttttgcctctgtcggaggagatacaccggagccggataagctcgctgacgaattaaaacacatgctgcttgatgcagaatcagccgtgactgcggaaaaacttgatcttgcaagaaaaaagaagatcgggtcattcttaaaagcgctcaattcgcctgaatatatcgccaaccaattcacacgctacgcctttttagatatgagtctgtttgatgtcgtaaccgtactggagcagattacgctggaagacgtaaagcgggtcattaaagaagaaatatcagaagacaggctgacagtctgcaaagtcgtgccaaaatcataacaaaaacatccctcacgccctgagggatatttttctggggaaagaaggagtattgattgatgaaacagacagcgctcgtaaccggagcaagcggcggaatcggacaaagtataagtgaagtcctcgcaaaaaacggatatgacgtcctcttgcattatcattctaataaggaagccgcacacaggcttgcggaaaggctgagcgcatcattcggcgtaaaagcctccgttattcaggcggatctgtcctcaccggatggagcggagacactcagccgttccgttaagcagcctgtggatgctctgatattaaacagcggcaaaagtcatttcggcctgattacggacgttacggatgacacggcgcgggagatggtgcagctgcatgtaacgagtccgtttcttttggcgcgtaatctgatgcccggcatgatccggaaaaaaagcgggggcatcgtcgcgatcggttccgtctggggagaaacaggcgcatcgtgcgaggtattatacagcatggtcaagggagcgcagcattcgttcgtcaaagcgcttgccaaagagcttgctccgagcggcgtccgcgtgaatgcagtctcgccgggtgccgttgatacaaatatgcttgatcagttcacgtctgatgaaaaagaagcgttggcagaggaaattcccgcgggccggctggcaaagccggaggaaatcgccgaagcggcggcctttttattatcggacaaggcttcctatattacggggcatatattatccgtaaacggcggctggcactgctgaaaaaaatgtgtgtatagtttgcatctgtacggacaaaataattttgtaacaacagatgaaatggaggaacccaacatgtcagtattagaaaactgggataattggaagaatttccttggcgacagattgaactatgcgcaggaaaaagggatgagtgatgaaacgatcactgacctcgctacagaaatcggcggttaccttgcgaacgaagtcgactcgaaaaaccatcaggaaaaagtgcttgctgatctttggagcgttgcttctgaagatgaacagcgcgccatcgcaaatatgatggtgaagcttgttgaaaataacagcactcattaagaggggggatttctcctctctttttttatgttttcctctatagagcaacattcttctttctaattagagaaaaatgttttatgataaaggaaggtaaaaatttgccacaatggagggggtatatcatttggcaaagctcgaatggtattttgaatatgaaattcaagtgaaccgccccggcctgctcggggatatttcatctcttctcgggatgctgtcaattaatattgtcacaattaacggtgtcgacctttccagaaggggaatgctgctcagatgccggcatatagatcaaattaaacgattggaatcaattttaaaaacaatggagaccattaaagtaacgaagctgagagaaccgaggcttcgcgaccgtctcgcagttcgccacggaagatacattcagcgtgatgccgatgacaaaaaaaccttccgttttgaaagggacgagctcggtcttctggttgactttatggccgagctgtttaaaaaagaagggcacaaactgatcggaatccggggaatgccgagggtcggaaaaacggagtccatcgttgcgtcaagcgtttgtgccagcaaaagatggcttttcgtatcatcaacgctgctaaaacaaacgatccggagccagctggttgccgatgaatacagcacggaaaacgtgtttatcctcgacggcatcgtttcgacaagacggggatctgagcgccatcttcagctcgtcagtgaaattatgcggcttccggcgacaaaggtcgtggagcaccccgatatttttgttcaaaattcggagtatacgctcgatgatttcgattatattatcgaactcagaaatgatcctgacgaagttattacatatgaacatgcagaagaaccgcaaatatttgatcagaccggtttttcaagctttgatttttaatattggaaggtgtttgttgtgacagaattagcaatccggcttaaagaagccagagaggaaaaagggatgtcattggatgaactccaggcggcgacgaaaattcagaaaagatacttaaccgctctggaagaaggcaattatgacgtcattcccggcaatttttatgtgcgggcgtttatcaagcaatacgctgaagctgtcgggcttgattcagatcagttatttgaagaatataaaaaagacatccctaacacgtaccatgacgatgtgtcggaaaaaatctccggtctcgccatgcaaagggagcttcctaagtccgcttcaaaggcggcggaatggcttccgaccgtccttgtcgtcatcggtgtcattatcgtcatcgcgatcatttatgcgattattcagctcggaatgagcaaatccgggcagacagacggagataaggcagtcacccaaagtgagagcaagtatgagattcctaaggattctgcgctgaaaaacgacggcaatacaaatgacgaagcgcaatctgacagcaaaaaagacaaaaaggacacaaaagcgtcagagcagaaaaagaaagaaaaaagcagtgaaaagacggagatcaaagcggccggaacggaaggctcggcttcttcatacaacgtctccggggcagataagtataagcttgaactgattgcttctgacagcgcatggatccgcgtccgtgatgacagcggcggttctttaaaagaaggaacactgcaaaaaggcgaaacctttaaaaaagacgtcacggatcaaaagcagattgaaatccgcacgggctatgcccctaacctgaaaattaaaatcaacggagaggttctgtcctatgaactcaatccgcatgatgtaatggcgcagaccatcacaatcaagatgaaaaaataaaaggggaaaagtcatctgaacgattaagatgactttttcttcacgtccgagtacatattattggaggggctttatgtttaacttaccgaataaaatcacactggcaagaatcgctttaattcctgtatttatgattatcatgcttgttccttttcagtggggcagcgttcatataggggatgaatcgattccggtcgcacatcttacgggagctgttttgttcattatcgcatcaacgactgactgggtggatggctactacgccagaaaactgaacctcgtgacaaacttcgggaaatttttagatccgctggctgacaaactgctggtgtccgcggcattaattacgcttgtgcagtttgaccttgcgccggcgtggatggtcatcatcatcatcagccgcgaatttgccgtaacgggattaagacttgtgctggcgggaacgggggaagttgtagccgccaatatgctggggaaaattaaaacatgggctcagatcatcgctgttgccgcgcttttgctgcataatcttccgtttgagctcgtttctttcccgttcggcgatatcgctttatgggtggccgtgctgttcacagtcatttccggctgggattattttgcgaagaactgggatgcgttaaaaacatctaactaagaaagaaggacttaaagatggaaatagcaaaaaaagcagaaatcattgcagtcggctcggagcttctgctaggccagatcgccaatacgaacgcgcagtttatcagtaaagagctggcggaaattggtgtaaacgtgttttatcataccgctgtcggtgacaatccggagcggcttaagcaagtcatccgcattgccgaagagcgctcagacctgattattttttcaggcggcctcggaccgaccaaggacgatttgacgaaagaaaccattgcaaacacactggggcgcccgctcgttctgaatgacgaagcgttccggtcgatcgaagaatatttcgcgaaaacaaaacggaccatgtcgccgaataaccgcaaacaggcgctcgtcattgagggctcagacgttttggcgaatcatttcggcatggcgccgggaatgcttgcagagcacggctcaaggctttatatgctgcttcccgggccgccgagcgagctgcgtccgatgtttgaaaatgaagcgaagccgctgcttcttaaaaagctcggttctaatgagaaaatcgtttcaaccgtgctgcggtttttcggaatcggtgaatcccagcttgaagctgatttagaagatatcattgatgcgcagacgaacccgacgattgcgccgcttgctgctgacggagaggtcacgctgcgtttaacggcgaaacatgctgacgaaaaagaaacagaacggcttttaaaagaaacggaagccgccattttagaacgtgtcggtgaatttttctacggatatgatgatacgtctctggtgaaggagctttcaaaagcatgcagacaaaacggaattacgatttcctctgccgaaagctttacaggcggcctgttttcagagtgggtgactgatttaagcggtgcgtctcaactatttgcagggggcgttgtctgttattccgacagcgtgaaacagcatgtgctcggcgtgaaagctgagacgctcgcagaaagcggagcggtcagcaaagagtgtgcgaaagagcttgcagccggtgtgagaaagctgaccggaagcgatatcggcatcagctttaccggggttgcgggtcccgacccgcaggaagggcatgcgccgggccgcgtctttatcggcatttcggcggaaggaaaagaagaggtgcacgaatttaactttgccggctcaagaaccggaatcagaaagcgcgccgctaaatacggctgccatctcattttgaaaatgctggatcaaaaataaagttttaaagaggcgttttctctgatttttaagttttacaagggaaattatgctcttttgcagaaaagcgaacgcggaaaaaatccgaatatgcgttcgcttttttcttggcaaatgccagtaaacaaggtatagtatatgtagtggcaagataaaggaggaaaaaataaatgagtgatcgtcaggcagccttagatatggctcttaagcaaatagaaaaacaattcggcaaaggttccatcatgaagctcggagaaaaaacggatacaagaatttcaacggtgccaagcggttcccttgcacttgataccgctctcggaataggcggatacccgcgcggacggattattgaagtatacggacctgaaagctcaggtaaaacgactgtagcgcttcacgcaatcgctgaggttcaggaaaaaggcggacaggcagcatttattgatgctgagcatgctcttgatcctgtttacgcgcaaaagctcggtgtcaatatcgaagagcttctgctttctcagccggatacgggagagcaggcgctagagattgctgaagcgctggtgcgaagcggagctgttgatatcgtagtcgttgactctgttgcggcgcttgttccaaaagctgaaattgaaggtgacatgggtgattcacacgtcggtttacaggcgcgtcttatgtctcaggcgctccgtaagctttccggcgccatcaataaatctaaaacaatcgcaatctttattaaccagattcgtgaaaaagtcggcgttatgttcggaaatccggagacgacaccgggcggccgcgcgctgaaattctattcttccgtgcgccttgaagtgcgccgtgccgagcaattaaagcagggcaacgacgtgatggggaataaaacgagaattaaagtcgtaaaaaacaaagtcgctcctccgttccgtacggctgaagtggacattatgtacggtgaaggaatctccaaagaaggggaaatcatcgaccttggaactgaactggatatcgtgcaaaaaagcggttcgtggtattcttatgaagaagaacgcctcggtcagggccgtgaaaacgccaagcagttcttaaaagaaaataaagacatcatgctgatgattcaggaacaaatccgtgaatattacggtttagacaataacggtgtaacggacaaagcggaagaagttcaggaagagatggaattagaagaataaaaacacgatcaaaagagcggaataagcaatttccgctctttttttgtgtgtttcaaaaaaacactggctgtttcggaaaattttatctggaatgttacaacttttttcacccttcactcgtctaacatcatggcgaaagttgaaattatatctgaggaggaaaaaagatgacgagcccccgccgcacaagaataaataaaaaaagaaagaagaagctgatgaaaacgggagggctgtttctttttctgctgcttgtcactgtttttattatgatctggaccgtcacagcgcatcaccgggagaaggaatccgttaaaaacgctcccgccgctcaatctgatacttcaaaagaccagactcaacagaaaaaagaaaagacgcaaaaagagaaaacacctaaatcaatcgatcacaataaacagatcagcaattacttgcaacagatcgggttcagcggcacagcaatgatcgtaaaagatggaaaagttgtgctgaaaaaaggctttggctatgcggaccgaaaacaaaaaattaaaaacaatccggagacatcatattatatcggttcttcacaaaaagcgttaatcgcgacggctgtcctgcagcttgaagaaaaagggctgctgcagacgagtgaccccgtcagtacatacttgccgaattttcccaacggcacgcgcattacattgaaaaacctgctcaatcatacgtccggcataaacgggcatattgagggacagggaccgatttctccaattgatttaatcaaggatatagaataccgcggaattaaacggcagcccggggtttgggattacagggattccaactattcagtgcttgcttatatcgtatctcaagtcagcggggagtcttatgaacaatatataaaagaacacgtgttcaaaccggccggaatgaagcatgccggattttacaaaacatttgtcaaagccaaatatcctgccgtcggctacaaagtcgatgagagcggcagtcttgtaacgccgcaccttttggacttatcgcagctgtacggggcgggcgacatgtatatgagcgctgaagatctctataaatttgataaagcgatcgtaaacggcacgctcctttcaaaagaaagcttcacaaaaatgtttacagcaggaagcagtgccgcttacggcatggggttttacattgatccgggaagctattccaatcacggtgttatgcccggttacaacattttgaacagcttcagccattcggcaagcaaatatgtcatattactgtcaaacattcagaataacgccaaattaggacaggtaaacaatagaatttaccaattgcttaaccaggcggactaacagagccgtcattcacaaaaagcggatgaaggtatggtatgatatatacatgggcgaagatccgagctgaaggcgaatcgttaagctggcaagcttgacaagtatttccgacacaattacaatgaagttgtaacatttgtttttttaacatgattgttaaaccatttaaacttgacaagggcatgagagactcattccctgtgaaggttctgtatgttgagaaaatcagacaatgtacatgccggcacttatttaagcaaaaaccaagttcatagcaagaggaggtgaaagtatgaccccaatgacggttctcatctccattttgctgactctgctcggtttagttgttggctactatgttcgtaaaaccattgccgaagcaaagattgcgggcgcacgcggtgctgccgagcaaatccttgaagatgcaaagcgtgatgctgaagcactgaaaaaagaagctctgcttgaagcaaaggacgaaatccatacacttcgaatagatgctgaacaggaagttcgtgaaagacgaaatgagcttcaaaaacaagaaaaccgtttacttcaaaaagaagaaaatcttgaccgtaaacatgaaggaattgataaacgggaagcgatgttggagaagaaagatcattctctgaatgaacgacaacaacatattgaagagatggaaagcaaagtggatgagatgattcgtatgcagcagtcagaactcgaacgcatttcgagcctgacacgggatgaagcgaaacaaatcattcttgaccgggttgaaaatgagctttcacatgacatcgccatcatgacaaaagaaaccgaaaaccgtgcgaaagaagaggcagataaaaaggcgaaaaacattctgtcgcttgctttgcagcgctgtgcagcagatcatgttgccgaaacgacggtatcggtcgtcaatcttccgaatgatgagatgaaaggacgtatcatcggccgtgaagggcgtaacattcgtacgcttgaaacgcttacaggtattgacctgattattgatgacacacctgaagcagtcattctttccggatttgatccgatcagacgggagacggcaagaatcgctcttgataaactcgttcaggatggccgtattcacccggcgcgcattgaagaaatggttgaaaaatcccgccgtgaggtagatgactatatccgggaaatgggtgagcagacgacgtttgaagtcggcgttcacggactccacccggatctgatcaagatcctcggccggttgaaattccgtacaagctacgggcagaacgtactgaaacattctatggaagttgcgtttttagccggtttaatggcttccgagcttggagaagatgcaaagcttgccaagcgggccggtcttctgcatgacatcggaaaagcaattgaccatgaagtggaaggaagccacgtggaaatcggagtggagcttgcgaccaaatataaagagcatccagtcgtcattaacagtattgcgtcacaccacggagacgaagagccgacttccattatcgccgttctggttgctgccgctgatgcactgtcagccgcaagaccgggcgcgagaagtgaaacgctcgaaaactatatccgcagacttgaaaagcttgaagaaatctccgagtcttacgaaggtgttgaaaaatcatttgcgattcaggccggccgtgaagttcgcatcatggtaaagccggactccattaatgatttagaagcccatcgtttggcacgtgatatccgtaaacgaattgaggacgagcttgattatccgggccacattaaagtgaccgtaatcagagaaactcgagccgtagagtatgcaaaataaagtgatgcttagcgcatcactttatttttttgagtccctgaaaaggaaggaatggaatgtatgagaattttatttatcggagatgttgtcggttccccgggccgcgacatggtaaaagaatatgtcccgaaactgaaagcgaaacataaaccgcattttacaattattaacggagaaaatgcagcacacggaaaaggactgacagaaaagatctaccacagcctgatggaagcgggagcagatgccattacaatgggaaaccatacgtgggataaaagagagatcttcgactttattgatgatgtgccgcatcttgtccggccggcgaatttcccggaaggtacgccgggcaaaggcattacctatattaaatcgaacggaaaagagcttgccgtcattaatttacagggacggacgtttcttccgccgcttgatgatccgtttgctaaagcggatgaattaatagaagaagcgaaaaagcgcacgccgtacatttttattgattttcacgccgaagcgacaagcgaaaaaattgcaatcggctggtacacagacggaagagcctctgccgtggtaggcacccatacacacgtgcaaacggcagataaccgcattttgccgaaaggaacggcatatattactgatgtaggcatgacgggtccgtacgacggaattctcggtatggacagagaaacggtcatcaagcggtttaaaaccaatcttcccgtccggtttacggtggcggaaggtaaaactacgctgagcggagtgctcattgacatcgacgatcaaacgaaaaaggccgtaaatatcgaacggatattaatcaatgatgaccatatgttctttgaataggtgatcatgtgtttattttataaaaatattaaaaggaaaagcaggaatatagcaacttcttagtgaatatagtagaaatggaaggtagcccgctatttttgaaaagcattgtggggatggctttttggatagcaacatctaataatgattgttctaatgaacactcacttatccattgtaaaactaagggggagcagaaatggaaatcttgaaagtttcagcaaaatcaagtccaaattcagtagcaggcgcgcttgccggtgtattgagggaacgcggagccgccgaaattcaagcaattggggcgggtgccttaaatcaggctgttaaagcggttgcgattgccagaggctttgtcgcgccaagcggcgtagatttgatttgtattccggcttttacagatatacagattgacggagaagaaagaacggcgattaagttaatcgtcgaaccccgttaaaaacaaaaacatgacattctcaacctgcttgcgtaaggcgagcgggttgtttttattgttgtcatattttctcacaatattatattgatagtacgaagagatgataaatggctttattcatataatattcaaaaaaaatcccgcccatttttccggacggaagcagttgttttctcggagtggacactggtgtttacctcctttttatatcatgttacaatccagttattacagtgttttttcgaggaggagtgtacatgttgggaggaaagatgaaagctatcgtcaaaaatgaaaacgctttcggagcaactctgaaagaaattcccataccttccattaatgagaatgaagttctcattaaagtacaggccgcatctatatgcggtacagatgtgcatatttataattgggatcaatgggcgcagaaacgaatcaaaacacctcaagtattcggacatgaattcagcggtatcgtagcggaaacgggcaagcacgtcacaaatgtcaaaacaggtgactacgtttcggctgaaacccacttcgtctgcggtacttgtgtcccttgtttaacaggaaaacatcatgtgtgcacccatacaaagatcctcggcgtagatacagccggttccttcgctgaatatgtcaaagtgccggctcgaaatgtttggaaaaatcccgctgatatggaccccgccgtcgcttctgttcaagagccgcttggcaacgcggtgcatacggtgctggaaagcagccagcttgcgggcggttccgctgcaattatcggctgcggaccgatcgggctgatggcggtggcagtggctaaagcggccggtgcatcccgtattgcggccattgataaaaatgattacaggctggctcttgcgaagaaattgggagccacgatcaccatttcagctgataaggaagatccgcttgaggtgatcgacaccttaacaggcggagaagggatcgaccttgtctgcgaaatgtcaggccacccggcagctatcgcacaaggattaaagatggcggccaacgggggaaggttccatatgctgagtctgccggaacgtccggtgacggttgacctgacaaatgacgtggtgtttaaaggacttaccgtccaaggcatcacaggcagaaaaatgtttgaaacatggcggcaggtatcgcacctgcttgaatccggccttgttgatctgacgccggtgatcacgcatcagtttccgcttgaagactttgaaaaagggtttgacctgatgagaaagggccagtgcggcaaagtcattttgattccataaggggagggttctataatgaaagaatttgaatttctaaaagcagagcttgataaaatgaaagaaaataaaacgtggcagcaaatgaaacaaattgaaacgaagcagggtccgtcggtggaagtcaaaggggaaaacgtgatacagctttcatcgaacaattatctcggtttgacgtcgcatccaaggcttgtcgaagcggccaaacgcgccgcggaagaattcggagcgggtacggggtccgtccggacaatcgccggaacattcacaatgcacaatgagctggagaaaaaattggcaaactttaaaaaaacagaagcggcacttgtttttcaatcggggttcacaacgaatcagggcgtcttatcaagcattcttacaaaagaagatatcgtgatctctgacgaactgaaccatgcttccattattgacgggatcaggctgacgaaagcagataaaaaggtgtaccgccatgttgatatggacgatttggaaagagtgctgaaaaaatcaatgaattaccgcatgcgcctgatcgtcaccgacggcgtattctcaatggacggcaacatcgctcctttgcctgacatcgtcaaacttgcagaggcgtacgatgcctttgtgatggtcgacgacgcgcatgcttccggcgtactcggaaaaaacggaaggggaacggttaatcacttcggtcttgacggaagagtccatatacaggtgggcacattaagcaaagccatcggagtgcttggcggttacgccgcagggtcgcaggttctgatcgattacctgcgccataaagggcgtcctttcttattcagcacttctcatccgcctgcggtaacagccgcatgcatagaagccattgacgtcctgctggaagagcctgagcatatggaaaagctatgggagaacacggcgtatttcaaagacaaactggttcaaatggggctgaccctcacaaaaagcgaaacaccgatcgtgccgatattaataggggaggaagaaaaagcccaggcattatcagaccttttattgacccgcggcgtctttgcacaaagcatcgtgtatccgacggtcgcccaaggaaaagcgagaatccgcaccattattacggcggagcatacaaatgaggagcttgaccgggccttggaagttatccgttcagccgcaaaagagctgcagcttgtgtaagggggaaatgattccctcttttttatttcttattgattcttattctcaataaggtgtacaataataggctggcggttgtgccaaacgcttttaaccagtatacttgagggtggaagtttcggttgaaaggagacattcgaacatgaatgaaaagcaaaagcaggaaagcggacaagtgaatccggcggacaaaacatccgaaaaggattacagcaagtattttgaagccgtatatattccgccttctttaaaagatgcgaaaaaacggggcaaagaatccgttcaatatcataacgattttaaaatctcagaagaatttaaaggcctcggtgaaggcaggaaattttatatccgcacgtacggatgccaaatgaacgagcatgatacggaagtcatggcgggtatttttatggcgctcggttatgaagcgacaaattcggttgatgacgcgaacgttattttattaaacacttgcgctatccgggaaaatgctgaaaacaaagtgttcggcgagctcggccatttaaaggcgctcaaaaaaaataacccggacctgattctcggcgtctgcggctgcatgtcacaggaagaatcagtcgtaaaccgcatccttaagaagcacccgtttgtcgatatgattttcggcacgcacaacattcaccgtctgccggaactgttatcagaggcatatttatcaaaagagatggtcattgaagtgtggtcgaaggaaggggatgtcattgaaaaccttccgaaagtccgcaacggaaaaattaaaggctgggtcaacattatgtacggctgtgacaagttctgcacatactgcatcgtaccgtatacccgcggaaaagaacgaagccgccgtcctgaggaaattatccaggaagtcagaagacttgcaagtgaaggctataaagaaatcacactgctcggtcaaaacgtgaatgcgtacggaaaagattttgaggatatgacgtacggactcggtgatttaatggacgaactgcgcaaaattgatattccgagaatccgattcacgacgagtcatccgcgtgactttgatgatcatctgatcgaagtgctcgccaaaggcggcaaccttcttgaccatatccatcttccggttcaatcaggaagctcagcgatgttaaaaatgatggcgcgcaaatatgacagagaacgctatctggagcttgtcggaaaaattaaagcggcgatgccgaacgcttcactgacgaccgatattattgtcggttttccgaatgaaaccgatgaacaatttgaagaaacgctttcgttatatcgcgaagtggaatttgacagcgcatatacgtttatttactctcctcgtgaaggcacgccggcagcgaagatgaaagacaatgttccgatgagggtcaagaaagaacgtcttcagcgcctcaatgatttggtgaaagaaatttcagccaaaaaaatgaaggaatatgaaggcaggactgtcgaagtattagttgagggagaaagcaaaaataaccctgacattcttgccggctatacggaaaaaagcaagctcgtcaacttcaaagggccgaaagacgccatcggcaagattgtacgcgtcaaaatcgaacaggcgaaaacatggtcgcttgacggtgtgatggcaggagaagcaatcgaggtgaaataataatgacgctttactcaaagaaagacattgtacagcaggctaggaaccttgcgaaaatgatttctgaaacagaagaagttgattttttcaaacgcgccgaggcgcagattaacgaaaatgaaaaagtctctgcaattattaatcagattaaaaccctgcaaaagcaagccgttaacctgaagcactacgaaaagcttgaagcgctgaaacaagtggaaagtaaaattgacgccctgcaggaagagcttgaagggattccgatcattcaggaattcagagattcccagattgaggtcaatgaccttcttcagcttgtcgcacatacgatctcaaatcaggtgacaaacgaaatcattacatctaccggaggcaacctgctgacgggagaaaccggttcaaaagtaaaacattcgaataacagctgttctatttaaacacggggccttcatcggcccgtgtttttttgcttttgagaactaattgtaatatgtactaaattttcattaactcaccgttttgtcccattttactggaaagttttatcatacttaaaagtaaagtttctgggcagggctgcatacaatgaaacagaaactttgtatttttatatttttattataaaaatgcacatgagacaaatgcccagcataagataacacgaagaagaacaaggaggcctgccggaatgtctgaatacagggaaattattacgaaagcggtagttgcgaaaggaagaaaattcacccaatgcaccaacacgatctcacctggagaaaaaccgtcaagtatattgggcggctggattatcaaccacaagtacgatgccgaaaagatcgggaagactgtagaaattgaagggtattatgatataaacgtctggtactcttacgccgataatacaaaaacggaagttgtaaccgagagagtaaagtatgtcgatgtgattaaactcagatacagagacacaaattacttagatgacgaacacgaagtcattgccaaagtgctgcagcagccgaattgtcttgaagtcaccatttctcctaacggaaataaaatcgtggttcaggcagagagagaatttttagcagaagtggtcggtgaaacgaaagtcgtcgtcgaagtcaatcctgactgggaagaagacgatgatgatgattgggaagacgatcttgatgaagaattagaggacattaaccctgaatttttagtcggagatcctgaagaataagttgaggctaggggagtttaacaccccaagtctcttttttatatataaagatatcactcttttgtttatgttataatgggattcggataagagaagatacatagtgagggattaaatgatggctagttacacgcctatgatacagcaatacttgaagataaaggcagagcaccaagatgcctttttattttttcggcttggtgacttttatgaaatgttttttgaagatgcaaaaaaagcgtcacaagagcttgaaattacactgacaagcagagacggaggttcggctgataaaattccgatgtgcggcgtgccgtatcattccgcggcggcttatattgaacagctgattaaaaagggctataaagtggcgatctgtgagcagacggaagatccgaaggcggctaaaggcgttgtaaaaagagaagtcgtccagctgatcacaccgggaaccgtgatggatggaaaaggcattcatgaatcggaaaacaactttatcgcttccgtttccgaattccgtgacggatacggtctcgctttatcggacttaacgaccggagaaaacctggccgtatttattgagcggattgaagatgtcatgtcagaaatttactcagtcggcgcaaaggaaattgtcgtatcaagcaagtttaacgaacatacagctgctcagctgaaagaacggtgcggcgccacgatttccatcgaagacggggaaataacagaacgcattgaaatcgcaaatcacttgccgggcgaagagctgacagagacgtttatgcgtttatatacgtatttgcagaaaacgcaaaaacggagcctggatcatctgcagccggttcaagtatatgaattggaagaagcgatgaaaattgacctgtattcaaaacggaatcttgagctgacggaaacgatccgttcgaaaagcaaaaaagggtcattgctttggcttttagacgagacgaaaacagcgatgggcggccggcttctcaaacaatggattgaccgcccgctgatcagggcatcccaaatcgaggaacgccaggaaatggtcgagacgctgatcaatcatctgtttgagcgtgaagatctgcgagagcgcctgaaggaagtatacgatttagaacgtctggcgggccgggtcgcattcggaaacgtcaacgcaagggatttaatccagctgaaagaatctttaaaacaagtgccgagcatcaaagagcttgtagggtctcttaaccataaaaaagcaaaagaacgcgccggcttgattgatccgtgcggagatttgcttgacctgttagaagaagcccttcatgaaaacccgccgttatcgttaaaagaaggcaatttaattaaagacggctatcatcagaagctcgatgagtaccgtgacgccagcaaaaacggtaaagactggattgccagactggagcagcaggaacgcgcttatacgggcatccgttcattaaaggtcggtttcaataaagtgttcggctattatattgaagtcacaaaagcaaaccttcatctgcttgaagacggacggtatgagcggaagcagaccctcacaaacgccgaacggtacattacgccggaattgaaggaaaaagaagcgcttattttagaagcggaaaacaacatctgcgagctggaatatgagctttttgccggactgcgtgaaaaggtgaaacaatttattccgcgcttgcagcgtcttgccaaacaaatgagtgagctggacgcactgcaatgctttgctacgatcagtgaaaacaggcattacacaaagcccgtcttttctgataatgaagtaaaagtcattgaagggagacaccccgtcgttgaaaaggtgatggacagtcaagaatacgtcccgaacaactgcctgatgggcgattcgcgggaaatgctcctgattacaggtccgaatatgtcaggtaaaagcacgtacatgagacagatcgcacttctatcgatcatggcccagatcggctgctttgtgcccgcaaaagaagcggttctgccgatttttgatcaaatcttcacgagaatcggggcagcggatgatttgatttccggacaaagcacctttatggtggaaatgcttgaagcgaaaaacgcgattgtgaacgccacaaaagacagcctgatcctgtttgatgaaatcggccgcgggacatcaacgtacgacggaatggcgctggcacaggcgattattgagtatgtccatgatcatatcggcgctaaaacactgttcagcacgcattatcatgagctgacggtgcttgaagataagcttcctcagctgaaaaacgttcatgtgcgcgcagaggaatataacggaacggtcgtgtttctccatcaaatcaaagaaggagccgcagataaaagttacggcattcatgtcgcccagcttgccgagctcccggacgatctgatcagccgcgcgcaggagattttgaaacagcttgagcagacgggagataagccggagcttccggcggtatctgagaaaaagtccgccgtcagagaagaaccggcacagctgtccttttttgctgacggtgaaaaagaacagaaggcaccggctgtttctaataaagaaaaacaagtgcttgaagcctttaagtcaatcaatattctcgatatgacgccgcttgaagcgttgaacgaaatgtacaagctgcaaaaaaaattaaaatagaaagaggtgacggacttggcaaaagtcatccagctgtcagatgaactttcaaataaaatagcggccggcgaggtggtcgaacggcctgcctcagtcgttaaagaattggtggaaaacgccatcgacgcaaacagcacagtcattgaaatcgacatagaggaagcggggctttcgtcgattcgggtgctcgataacggcgaagggatggaaaccgatgattgcaagcgggctttccgccgccacgcgaccagtaaaatcaaagatgaaaacgacctgttccgggtgagaacactcggtttccgcggagaagctttgccaagtatcgcgtctgtttctcatctggaaatcaaaacgagcatcggcgagggagcgggaacccatctcattcttcagggcgggaatatcatttctgagcagaaatcctccagcagaaaaggaacggagattatcgttaccaacctgtttttcaatacacccgccagattgaaatatatgaaaaccgtgcatacggagctcggcaatattacggatgttgtcaaccggatcgctcttgcgcatccggaagtatcgatccgtctccgccatcaggggaaaaatctgctgcagacaaacggtaacggggatgtgcgccatgtgctggccgcaatttacgggacggcggttgcgaaaaaaatgataccgctccatgtcagctcgcttgattttgaagtcaagggctacattgcgcttccggaaatcacgcgtgcatccagaaactacatgtcatctgtcattaacggaagatacattaagaatttcccgcttgtaaaagcggtgcatgagggctatcacacacttctgccgatcggccgccatccgattacgtttatcgaaattacgatggacccgattttggttgatgtcaatgtccatccgtcgaagcttgaagtccgcctcagcaaagagacggagctgcatgagctgatccgtgacgggataaaggaagtgtttcaaaagcagcggcttattccgagcgcccagctcccgaaaaaatcagcgccggcgccggccaaaaacgaacagcaatttatgacattcgaggaaagcgcgcctgagcggaaacttcctgaaaaaacgccggagccgtcttactcaccaatgaagctgagttcggtcgtaaaagagcctgagccggtaataatagaagaagagatcctcccgaatgaagcggatcacgatgtgccgccgaagatcggtatgcccgaaacggcagcgcctgtttccgatactccggaaccggaagctgtctctgaagaaatacgggaagaaagagttccggtgatgtatccgatcggccaaatgcacgggacatatattttagcccaaaacgaaaacggcttgtatatcattgaccagcatgcggcccaagaacggattaaatacgaatatttccgggagaaagtcgggcaggtcgagcctgaagtgcaggatatgatcgtgccgctcacctttcattacgcggcaaatgaagcgctgattattgaccagcatcagcatgagcttgaaagcgtcggagtatttttagaagcattcggcacgaacagctacatcgtccgctgccatccggcctggtttccaaaaggggaagaagctgaactgattgaagaaatcattcagcaggtgcttgacgccaaacagatcgatattaaaaaactgcgggaggaagcggccattatgatgagctgcaaaggctcaatcaaagcgaaccgccatttgcgaaacgacgaaatcaaagcgctcttggacgacctgcgccgaacgacagacccgttcacatgcccgcacggccggccgatcattatccaccacagtacgtatgagatggagaagatgtttaagcgtgtgatgtaataacaacgtttatgtgagactaaaccgttatttgcctacaagcagccttactagtttgaatgacccagcctttcagagataacttttgagttttttaatttctggcataattggtgcatcggtatgccgtcaatcatgaaaatgatttgtttaacatccagctgcttttccgtcatataaaaattgtttttggagagtatttgggattggcgatgtagtatcctgtgtttggtgtaaccgtctatatcgtccattgactgcattaatagtgaaataattggagaaaacggttcctgaaaaatctcatgttatttgtgaagaatttaaataaaattggaatttggcgggttatactatccgcaagtcagtcaagggggactagtaattagcccccccttacatttagttcttcctgcggtattttctatttttgatcaaactgaaaaccactaagagaaccacaccgatagcaacaatataaaatgaaagttctgctgctgcggtattaatattcttaagaacaaggataagccctattaaaactataggaataatgtaagttagaatttttatagcttttgggctcggttcagcattacttttatgttccatagttacctccgatcttagcactttagaaaataatcactttaaagcttaacacaggataaatttgttaaacaccaacaatagccccgtttaaatgaaaagcctaagagttttagtaatccgccaagcggctgttgggttgccagttcttttagagcacccgcatagcacgcatcttccactgcaccagtaaaattgtcgatcgtattaagaattatttcaaaacgccgattctacccataggcagctttagcaggtattgcatcccagggcaatttaccttgagcagtaaactccgacccatataacatagtctatttgtctaatgtttaatattttatatttactttttacacttaatgattttatgttagttttgtttttgcacagtaaaaagctgcgcgacgctttcgtgaattgttgcagctagggctgatttgaaaagagtgtaaattacgccgtacttttctaagttcaattatgttaatgtcaacataacgttgaattcggtgtaagaactaaggtattctgatatatttcgagagcccgtatggtttagtttatcttgaagaaaaggattgaaataatagtcttgattgcgggtcatttctaaaaactgattatccccttcggccgcttcggcaattgcttttcaaaacaaaagctcaatttgttttctttttatccgaaactcatattcatccttcattttctgaataaaattccctaaagaattcatctaaattaatattctgatttacttatatatcagcatagcaatttgtaaaaaaggtccagactggtgcttttggcgggagcagaaagtttttttaactttaccggaaaatccatggaaaaacgtggtgtcatctggtaaagtggttacagtcggctgggcggcggcagcagtctgcccggatcttttaaatgggaatggtgacaatggatcatacatatgaagtgcatcaaatcaaaacttatcaccagatgtggtccaactattgttatattatcgcagaccgctcaaaaaaatctgcgatagcggtggacccgtcctgggaaatcgataaaataaccgataaactgcatgaattggatgttgatttatcagctattttattaacacattcgcattatgaccatgtaaacttggcgaagccgcttcagcaaatctatcattctgatatatacatgtcgtcggcggaaatcgatttctatcaattccggtgcagaaacttaatagcgcttgaagacggccaaacctttgcggccggagggtttatcatcagaagtatactgaccccgggacatacggccgggggaatgtgctatttgctatctgatcatctttttaccggtgacaccgtgtttacagaagggtgcggtatatgtggggacaggggcagctcagctgaagatatgtttcacagtatacagaggatcaaagcctccattccgccgcatgtgcgtgtgtatccggggcactccttcggggagaagccgggtcaaaaaatggagagtcttttgaaaaacaatatttactttcagattgaaaaaaaagaacattttgtgaatttccgcaacagaaaaaatcaaaaagggctgtttcattttaagtaatgtgtaatttagttctatctaactagcttttcttttgaggcaaggaacttctgaaatggaatggaagttattactagatttctggtgatgaatggctgagtaacgggagtttgcggaagagaacgccgggcaggccggatgggacattctgcttacgcctgttccgaaagccctgagtccgcctttcgacagggaaaaataggcattattcaggagttcgcataggataaattaacttgacatggtatttttgtgaagttactatcaacttgaacatgcttcttatctgaatccgagaaaggatggctgagaaaatgatcacatacttattccccggacaaggttctcaaaagcagggaatggggagctcattgtttgatgaatttaaagacttaacggagcaggctgatgaaacactcggatattctatgaaacggctttgtcttgagaatccgtattccaaccttcacaagacgcagttcacccagcctgctttatatgttgtaaacgcgttaagctatttgaaaaaaatccaagacaatgacataaagccggattatgtggccggccacagtttgggagaatataatgcgctgtttgcagcaggtgcttttgattttattaccggtctgcagcttgtccgtaaaagaggcgaattaatgagtatggccactgacggaaaaatggccgctgttatggggttaactgcagctcaagtgtcagacgcccttcaaacgcacggattacatacgattgatattgccaatatgaattctccttaccaagttgtcatatccggacgcaaagaagacattgaaagagccaaaagcgtattcgaaggattaaaagacgttacgatgtttcatccgttaaacgtaagcggcgcttttcactcgagatatatgagtgaagcaaaacaagagttcgaaaaatttttacagtcatttcatttttctgctatatcaattcctgtcatttctaatgttcatgccagaccttatgagcaagacggaatccactccgttctggccgatcagatcgaccattcagtgcgatggaacgacagcatccgctatctgctggacaaagggcggatggaatttgaagaagtcggcccaggccatgtgctgacaggacttattcaccgcatcaaaaaagaaactgaagcttcacccgccatgtagcggaatgcaagtcaaaattcttatctcacacaatagtgccagccatacaacatcacgaccacttcacctgcacacgacatcacgaaaaactcacaaatcaatattttgaaaaaataaagagcaaaaaggagaacaaatgaaccagccaattgttttcatgttttctggacagggttcccaatactatcaaatggggaaagagctgtttgcacataacgccgcttttcggcagaaaatgcttgacttggacgattttgcagtcagccgtttcggttactctgtccttaaagagatgtatcatacaggcaatcgtctgtctgatccatttgaccgccttcttttcagccatcctgccatttttatggctgagtacgcacttgcatatgctttggagcaaagaggcatacgtcccgattatgtgatcggagcaagcctcggagagtatgcagcggccgctgtgtcgggggtgctgagcgccgaggatgctttagattgcgtgctggaacaggcccgaatcgttacggaaacttgccgtaacggcagcatgcttgcgatactgggtgatccggctttatatcaagatgatccgctgctcggcgaacatagtgaattggcatctgtaaactatcattctcactttgtcatctcgggagagcgggaacatatcaaaaagatcatggacgatctgagagaaaagcagattcctcatcagctattgccggtatcttacgggtttcactcagcgctggttgatcaggcggaacagccgtacaagcgctttttagctcagaaatcaatccggactccgtttataccgtacatctccagtgcgaccggaggggctgagaccgatatacaagcggactttttctgggatatcgtaagaaagccgattcgattccgcgaagcgcttcaattcgcagacagccgccaaaaaggattgtatattgatgccgggccttccggaacattggccgcatttgccaaacagattcttcctgcaggatcggctgaacgcatccgtgccattatgacgccgtttcataaagaacaaacacatttgcagcaaatagaagacagcattttatcaccgcccggaaggagactgtaagatgatcagctttgtttttccaggccaaggctcgcaaagaatagggatgggggaggacctgttcggccgctatcctgaattaaccgcaaaggccgatcacattctcggatattccattcaggagctgtgccgggacggagaacgtctcaatcagactcaattcactcagccggcgctctatgtcgtcaatgccctcagttatttgaaaaaaacagaagaaaccggcttgaaaccggattttaccgctggacacagtttgggcgaatataacgcgttatacgcttcgggcgcctttgattttgaagaaggcttacagttggtcaaaaaaaggggcgaactgatgagccgcgccaaaggaggcggcatggcagcggtgatcggcctgactcatgagcaggtgacggatgttttaagagaaaatcacttggatatgattgatatcgccaacatgaacacaccgcagcaaattgtcatttccggatataaagaagatattgaaaaagcagcatccgtttttgaagccgtaaacggcgtaaaaatggttcaccgcttaaatgtcagcggcgcctttcactccagatacatgctggaagcgaaggaagagttttcacggtttattgaatctttccattttaagccgctgtccatcccggtcatttcaaatgtgacggcaagaccctatgagcagagagagctgaaagagacactcgccggacaaataacgggatcggtgaactggacagacagcatccgttacttaatgggaagaaagaacatgagctttgaggaaatcggtcccggaaaagtgctgacggggctgatacaaagaattacggctgaagcggagccgataacagatgaaatcaaagtcccggctgaggctggaaaaagctcaattacggcagcgtctttaggaaatgaagagtttaagcgcgattatcaattgaaatacgcctacttggccggcggcatgtaccgcggaatttcttcgaaggaaatggttgtcaaactggctgaaaaaggaatgatgggctttttcggaacgggcggtttgaacatcgcgcacgttgaggacgccattttgtcaattcagcatgagcttcgtgacggcggttccttcggcataaatgttgtacataatatgaagcatacagattcagaagaaaaaatgattgatcttttactgaagcatgggattcagaacttggaagcatcagcgtttttaacggttactcccgctttagtaaggtttcgcgctaaggggttaaaacgcggtgccggcggacaaataatagcgcgtcagcggattatcgccaagctgtcccgtccggaagtagcggaagcgtttctcagcccggcgcctgatcacattctgcagaaacttgcagccgaaaacaaaattaccgctgaagaagcaagtctgatgagagaaatacccgttgcgcatgacatctgcgtagaggctgattcaggcggccacactgacggcggagttgcttacagtctcatgccggcgatcatccgtttacgagatgacatgatgaaaaaataccgatacggcaaaaccgtccgcatcggagccgcagggggaatcggaacgcccgaggctgccatggctgcatttatgctcggcgctgattttattgtgaccggatctattaaccaatgcaccgttgaggcagcgacgagcggcctcgtaaaggacctcctgcagcagatgaatgtgcaggacacggcctacgcgccggccggcgatatgtttgaatcaggcagcaaggtgcaggtattaaagaaagggctgttctttccgacccgcgcctctaagctgcatgaactgtatcagcgtcaccgctcaattgaagaaattgatgaaaagacactcagacaaatagaagagaagtattttaaggcaagtgtaagcagtatttatgacaaagtgaaggctcattattcgaatgaagacatttcaaaagccgaacggaatccgaaacagaaaatggcgctcatattcaaatggtatttcaggcaaagttctgcttcggcgattaaaggagacccggatgccaaggtagacttccagattcattgcggcccggcattaggcgcctttaatcaatgggtgaaaggtacggagctggagtcctggaaaaaccgccatgccgatggtatcggcatgcggcttatggaagagacggccacgcttttgaatcagaagttaggttcatttttgcaaacgtgttgacaagacgaaatgatagattgaaaacatggaatattcataaaagatgaaacagggaggaactgacaatgagtaaagaaagaatctttgaattgctgcagaacacaatctacgaggttttacctgatttagaaggcgaacagctttcacaggaagaccggttagttgatctgggggcggattcagtggaccgcgccgaaattatcacgatgatgcttgaagaattatcactgcagatcccgcgtgttgagctgacgggagtgtcaaacatcggcgaattggcggaaaagctttatgaaaaggtacaggctgtctgataaaacggtggaaaaatcggaaactcaaaattcatattggaggcgaagttcatggcggctgccggaatagaagcgataaatgtgtttggcgggacagcataccttgatgtcatgcagctggcggagtacagaaacttagaccctgccagatttgagaatttactgatgaaagaaaaagcggtggcgcttccgtacgaagaccctgttacattcggcgttaacgcggcaaagccgattatcgaccgattgacagaggctgaaaaagacagaatcgagctgctgattacctgctcggagtccggcattgacttcggaaaatcactcagtacatatattcatgattacttaggcctcaaccggaactgccgtttatttgaactgaaacaagcctgttattcaggaacggcgggtttgcagatggcgcttaactttattttgtcgcagacatcccccggagcgaaggcgcttgtcgtcgcgacggatatttcccggtttttaattgccgaaggcggcgatgcgttaagcgaggattggtcttacgcagaaccgagcgccggagcgggtgccgtcgccttattgatcggtgaaaatccaattgtatttcaggcggatgcgggcgctaacggctactacggctatgaggtgatggatacatgccgtccgatcccggacagtgaagccggtgacgccgatttgtcattgatgtcttacctcgattgctgtgaacagacatttcgcgagtacaaaaaccgtgtgccgggcgctgactacaaagagacgtttcactatcttgccttccatacaccgtttggcggcatggtcaaaggggcccaccggacgatgatgcgcaagcttgcaaaagcgaaaaacgctgaaatcgaacaggattttcaaaccagagtagagccggggctccgctattgccaaagagtcggaaatattatgggagcagcctctttactggctcttgcaagcacgattgaccaagggggattcgacacttctaagcggatcggctgtttttcctacggctccggatgctgttcagaattttacagcggcgttgtgacgcctgaagggcaagcgcggcagcattctttcaatatagaagagcatctgaacaacagatacaggctgtccatggaagagtatgaagaactgtttaaaggcagcggtctggtgaagttcggaacccggaatgtcaaattggatattaatatgattccgaacattttagaccatcatgccgggagccctcgtttatatttggaagaaatcacggaatttcatcggaaatacaggtggatatcgtgacctatgaaacgataaacgtccgttttcagcaaaatgtctgcttcatcacctttgatcggcctgaagccaacaatacgattaatgagcgtttagtggaggaatgcctgcatattctttctgaatgtgaagactccgtgacctccgtagtgcttgaagggcagccggaggtattttgtttcggggcggattttgatgagatgtaccggaaaatgaggcagggaatgcagcatgcggaatcgcaggagccgctttaccgtttgtggctggcattaaaatccgggccgtacatcacaatcgcccgcgtccgcggacaagtaaatgcgggaggtgtcggttttgccgccgcgtgcgatatcgtcattgcagaggagaatgcttcgttcagtttatctgaactgttattcggactttatccggcctgcgttctgccgtttttaattcaaagaatcggatttcaaaaggcgcattatatgacgattatgacaaagcccgtgccggcacgccaggcgcttgaatggggactttgtgacgtatgcgtcccggactcagcaacagagctgagaaagcatttgctgcgtcttcgccctctgtcgaaaaaagcagtcatccgctataaacaatacatggattccttaaacgaccttgttcatcgttcgaaatccattgctctagccgaaaatcaagcgatgttttcagatccggataaccaatcagccatcttccgttatgcagaaacggggcggcttccttgggaaacggagaacagttaggaggatatcatgccgaacgccgcagttgaactgctcgaaattgaaccggatattatccaagtgacaatgcaggataaagcccataaaaacgccttctccaaagaactgacggatggattgatggaagcattcacccgtataaaaaaatcgtcagtctataaagctgtgattttaacaggatacggccattactttgcttccggaggcacacaggaaggcctgctcaggattcagcagggcatcacgaagtttacggaagaccgcatgtactctttggcgctggaatgtgatattcccgtcatttccgccatgcagggccacggaatcggaggcgggtttgtcatggggcttttcagtgattttgtcattttaagcaaagaaagcgtgtataccgcaaactttatgaaatacggtttcacccccggaatgggcgctacctttatcgttccggagaagcttggggcaagcctcggccatgaaatgctgttaaacggcggccactaccgcggcggtgacctggagaaaagaggggtgccttttccggtgcttcctcggcaggaagtactagactatgcgcaggaattggcccgtgagcttgcggaaaaaccgagaaactctttaattacattgaaaaggcacttggtgacgccgtttcgcgagcagcttccggccgtcattgagaaggagttaatcatgcacgatgagacgtttcatgatgatgaagtgaaaaaacgaatcacgacgatgtacggagtataagacatacatcttacatacagatgaaatggaggcagctctatgaaaagtgatatgaaggcaagcgggttactcaagccatctgtcagctatggaaaatcattgcggctttcagcggatcagccgatgacgattcctgaagtcctgcacaaaaccgccgcggcagcgggagatcaaaagggcatcacatatatacagcctgacggcaccaaagtgtaccagacttacagcggcctgaaaaagatcgctctttcgattgtgaaagggctccgccaatcaggagtgaaggctcaggatgaagtcatattacagctcagtgacaattcccagctgattcctgctttttggggctgtgtttttttaggagcgatcccggttccgcttgcggccgctccggcttatacagaaatgaacagcgggacgcaaaaactgaaagacgcctggacgcttttgaatcggccgtatgtcatcacaagccgtgacgtgctgccggagatgactgaatgggcggaggagcaggagctttccgggttttgcgctttggcggcagaagatctcagtgcgcacgaaatggatacggactgtcatcatccccgtcccgaagatttggcgatgctgcttttgacctcgggaagcacgggcacgccgaaagccgtgatgctcagccatgaaaacatcgtctgcatggtcaaaggaaatattcagatgcagggctatacaagtgaggatgtcacgtttaactggatgccttttgaccatgtcggcggcatcggaatgcttcatctgcgtgatgtttatctcggatgtgaggaaatcaacataccgagcgaatccattttgatggaccctttaaaatggctcgatctgattgatcattaccgcgcttcggtcacgtgggcccccaattttgcctttgggctgcttgccgattttgcagaagagattcaaacgcggaaatgggacttatcttccatgcgttacatgctgaacggcggggaggccgcggttgcgaaagtcggacgcagaattatggagcttttagagccgcacggtctgccggctaatgccatccgacccgcatggggaatgtccgaaacgtcttcaggcgttattttctcagatgagtttacactggaaaacacgaatgacgacgatcgtttcgtcgagatcggtctgccgatcccgggatttaatatgagaattacggatgaccgcaatcaagtggtggaagaaggagaaatcggccgcttccaagtgtcgggtctgactgtaacgagcggatattatgagcgcccggacttaaatgagagtgtctttacagaagacggctggtttgaaacgggagatctcggatttctgcgtgaaggccgcctgacgataacggggcgcacaaaagatgccatcattatcaacggtgtgaattattacagccatgccattgaatcagccgttgaggaattgccggaaattgaaacgtcatatacagcggcatgcgccgtccggccgaatcaaagcacgacagatgagctggcgattttctttgtgacatctgttccgttggatgagaaccgcatgacgaagcttcttcatcacattcaccagcacgtgacacagagaatcggcgttacccctgattatctgcttccggtcgcaaaagaagacattcctaagacggcgatcgggaaaatccagcgcactcagctgaaacattcatttgaacaagggcaatttgattcattacataataacagacaagaaggcggcaattcagacacggcttctgcagagaaagaaattgaacgggattttatccgttttctgaaagaggaactttccatcgcggatgagctcgttgatccaaatacaccgtttcaaagtcttggcgtcaattccatcaagatgatgaaactcgccagatcaattgaaaaaacgtatcacatccggctgacggcaagagagctgcacaaaaacccgacgattggcgctttagcggcttatactgctgaaaaagcggcaaacatgtcagcggaccatcatccccaaaaagccgaaccgccggcagaacgggagagacggcaaacggcaccagcgctttcagaagtccaaaaagggctgtggacattgcagaaaatgtcgcctgaaacgactgcataccatgtcccgctctgtttccgattcacatccggaatcgacaaagagaaactgaaacaggcgtttcagctcgtattaaagcagcatccgatgctcaaaagcgccgtgaatgaaacagaaggcgggttttatttcatagaagcggcagatccttttgtattctcggaagaagatatttctgacgtcaatgaatcacaaatatccgctctgatacggaaaaaagtgaaagagccgtttgtcaaagaaggcggacctttactgcgcgtgcagctgctttcaaaatccgccgaggaacattatcttttgacggtcattcaccacatcgtgtttgacggcatttcatccattacatttattcacagtctgctggaacattatcaggcgctgctggagggaaaagaagagtttacggctgccgctcccggtattcatcccgatttcgcggcttgggaaaagcggtatttagcgggtgacgaaagcaaagctgcccgcgcttactggatgaaacagctcgagggcgatctgcctgatcttcagcttccgccgatgcgcacggacagcagtgttccggagtttacagaagatacgctgacacgccgtcttcccgaacggctgctgaataatataacggcgtttgccgcatcccgttcgattcatttgtctaccgtcatgctgagctgctatatggtgcttttaagcaaatatacggataaggaagatattgtgacaggcatgcctgcaatggtcagacccgaagaacgctttgacggagtggtcggccatttcctcaacatgcttcccatacggagcagagccggacgaaaagaaacatttgctgactttgttcaaaaggtgcaggatgccgttctggacggactggatcactccttttatccgtttccgaaaatggtgcgtgatgtgcatgcgaaacccctgcagaacggttcgcctgttttcagcaatgcctttttctatcagaactttctgcagcattcaagctatcaatcgatgcttgatgaatacaaggaattctcctgtgagtttgtaaaagacattcatcaggagggggaatatgatcttgtatttgaaatgtgggaagaagcatcaggcatggatcttacgattaaatacagcaccgaattattcgacgaagcaggggcggccagacttttcagccaatttgtacaagctgctgaagctttgacggcgaatccggatatgccgcttgagaacgtttctctcatgacaaaaagagaggagcacatgattcttaagacttggaatgaaacaagccgtgaatatccgaatgcctgcttccatgaattattcgaacgtcaggcggcagaaacgccggacgcttgtgcggtcgtgtatgaacagcaacagctgacgtaccgtgagcttgatgaaaaaagcacgaagctggcgctctatttgcaggcgcacggtgcaggccctgatgatctcatcggcatttatacagaccgttcattgcatatggctgtcggacttctcggcattttaaaagccggaggagcgtatgtgccgcttgatccttcttatcccgctgacagattggaatatatgatcgccgacagcaggatttcaatgtgcctgacgacagctgatttagagcactctttgaactggggaggcgtgcagacaactgccattgaccgcgagtggtctcatattgaaagtacagccgcggaaagaacgtcgctgaagcggttagtgacacctgacgatctggcgtatgtcatttacacgtcgggcagcacgggcaaaccgaaaggcgtcatgattccgcaccgggcgctgaccaatttcttaatctcgatggcgaatgaaccggggctttcgtccgaagacaaactgcttgccgtcacgacatattgctttgacatcgcggcactggagctttaccttcctttaatcaaaggagcggagtgcaacatctgtaagacagaagtcacaaaagacgcacggaagctgaaagagctgattcaagagtacaaaccgacgatcatgcaggcgacgccgtttacgtggaaaatgctctttcattccggatggtcaaatgaagaaaatgtgaaaatcctttgcggcggtgaggcccttagcgaamaattgaagcagcagtttctcgatacgaaaagtgaggcttggaatatgttcgggccgacagagacgacaatctggtccgcggtgcagcggataacgaaaaatgagagcgcgcttacgatcgggcgcccgatcgccaatacccgcgtgtatattatggattccggtctcaaccctgttttagaaggggtgccgggagaactttgtattgcgggagacggattggcaagagggtatttcaacaagcctgagctgacagataaagctttcgtcagccatcggctcgaactgggatcaaagctttataaaacaggcgatatggcgcgttttcttcccggcggccgcattgaatacatgggacggatggatacccaagtcaaaatccgcggctaccggattgaacccggagatattgagagcaggctgaatgcccatccggccgtacaggaaagtgtagttgttgtgaacaatcactccggaaatgagaagctttgcgcgttttatatccggaaaaacggagagccgcttccgtctgcaaaggaattgcgcaatcatatgaaacaagcgctgccggcctatatggcgccagcttcgtttgtccgtcttgaagagctgccgcttacgccgaacggaaaagtggaccgcaagcttcttgctgcccgcgatctgacggaaaagcagccggacacacaaacattttcatcatctcatatccagcaggccgtactggcgatttggcaggatgtattgaaaagcaaagatatagagcttgatgaccgcttttttgatgcggggggagattcgcttcttgccgtgactgtcactgaccggatgacgcaggaactggattgtgaattcagtgtaacggagctgtttgaatacgcgacggtaaaagacatcagccggtatatcgctgagcaaaaaccgaaagaagccgttttggctcctgtaccgcaaaagaaagtgaatgcagaagaccgggaacatccggcggaagaatttcccgattattacgaggacagccttgcggttatcggtatatcctgtgagtttccgggagcgaaagatcattatgaattttggaataacatcaaagaaggcaaagaaagcatcaccttcttttcaaaagaggagctccgccgattcggtatttctgaagaactggctgatcatcccggcttcgttccggctaaatcagttttagaggggaaagaaatgtttgatcccggtttcttcggcttttcaccgaaagatgcggaatatatggatcctcagctgagaatgcttttgctccattcatggaaggcaatcgaggatgcgggatatatctccaaagaaattccggaaacaagcgtgtatatgtctgccagcacgaactcttaccgcagcctgctgccggaggagacgacagcacagctggaaacgccggatggctacgtgtcatgggtgcttgcccaaagcggtacgattccgacgatgatttctcataaactcgggttgaaagggccgagctattttgtccatgccaactgttcatcttcgttaatcggcctgcattcggcttttcaaagcctgcagtccggcgaagccaagtacgcccttgtcggcggtgcgacccttcatacggaatcaagcgccggatatgttcatcagccggggctgaatttttcgagcgacgggcatattaaagcgtttgacgcggatgctgacggaatgatcggcggtgaaggagccggcgccgtgctcttgaaaaaagcgtctgatgccgttaaggacggcgaccatatttatgcgctgctgcgcggaatcggcgtcaataacgacggagcggataaggtcggattttatgcgccgagcgtcaaaggacaggctgaggtcattcagaaggtcattgatcagacgggcatacatcccgaaacgatcgcgtacgtcgaagctcacggcacaggaacaaaactcggcgatccgatcgaactgtccgcacttcaatcggtgtacggccgatatacagataaaaaacaatactgcggcatcggttcagtcaaaacaaatcttgggcatttggatacagcggcaggaatggcgggctgcatcaaggttgtcatgagcttatatcatcaggaaatcgcgccgagcatcaattacaaagagccgaacccgaatcttcatttagaagactctccgttttacgtagcggaagaaaagaaagagttaacccgtgagaacagagcgcaccgcatggctttaagctctttcggtcttggcggaacaaacacacacgcgatttttgaacaatatccggatgcatctaaagcagcagacgctgccggtccgttcatcattccgttgtctgccagaaaaaaagatcgtctgaaggagtacgcaaaacagctgctggcttttctggaaagaaaaacggacacagacctcgctgatcttgcctacacgttccaagtcggaagggaagcgatggaagagcgcgcggcctttatcacaagcggcactgcggagctgaagcggcagcttgccgattttatcaatgataagccggctgtaacaggctgcttcagaggagaaaaacagcaggcgaaagatattgcctggctttctgatgatgatgacagcgctgaactcattgagaaatggcttgcgaaaggaaaaggaccgaagctctgtgaaatgtggagtaaaggcgtcgccattaattggcacaagctttacaaagacaagcatccgaaacgaatcagcgtgccggtctacccgtttgcaaaggagccgtactggccgaaaaaagcagaaaagaacacatctgccgcacacaccggagtctcagttttacacccgctcgtgcagcaaaacacgtcggatttggccgttcagcggttcagctcacggtttacaggctcagaatttttcctgaaggatcatgtggtcagggaaaaagcggtgctgccgggagcggcatatttggaaatgtcttatgaagcggtaaaacgggcgcttggcggcttattaaaagaccaagacagaataacgctccatcatacggtctggatgaaaccgatcgtcgttcacgaacaagagcgccaagtccatattgcgctgttccctgaagaggacggcatcatctcatatgacatttacagcgtcaacgctgacggcgaagaagtgctgcacagccaagggcgtgccgagatcataaaggctgaacgagagcctgaggccgacctttctgccatacaaaacaggtgcaaagcggacattcttgatccggcggccttttatcgggaaggccggagcagggggatgttccacggaaaagccttccaaggcattaagtccgcctttatcggcgagaaagaagtgttttcggacatacagcttccggattctgtttctcatacgaacggacaatttacgcttcatccgagcatcattgattcggctattcagacggcgacgatctgtattatgcaggagttttccggacaaaagctgattctgccgtttgcgttggaatatcttgaagtcatcaaagcatgcacgccgactatgcgggcgcatgcacgcttcagcgatggatatcaaaccggtgattccgtgcagaaagccgacattgacctgttcgacgaaacaggagcgctttgcgtgaaggtgagaggattctctacgagagtgcttgaaggcgatgcagaatcggctcagccgccatcaggatcggaaaaggtcttgtttgcaccggtctggaaagaagccgccgcatccgagaaagcttctgtccgtgctgatgagcatttgatcatactttgtgaagatgcctgccgtataaaagatgaaacggcattcggcctgaaagacgccgaactgctgattgcagaaggtgagggtgaaacagccgctgaacgcttccaaagctatgcgcagacaatcgccgaacacatccggcggatcatcagcgaaaaaaggcagggccgcattctgattcagaccgttatttcagcagacggcagccagcaattgtttgcggggttaacaggtttgttaaaaacagccgagctggaatacggaaaacttgactgtcagctcatcgaaatggaatcaatcggcgaaatgccggctgtcgctcaaaaactgaaaaacgacagtcatcggccgcatgataaacatatccgttataaaggagaaaaacggtatgtgaaggcttgggaagaaatgcatcctgcaggaggcggcaccgtctggaaggacgaaggtgtatatctgattaccggaggggcaggaagcctgggcttgatgttcgcaaaagaaatcgcaggtcgcgtaaaacacccgaaaatcattctgacgggccgctcaaatctggcagaagccaaacagcgtgagcttgctatgcttcagcactcaggcgcaaatgtcgtctacaaaaagctgaatgcggcagatcggcgggaaaatgaagcgctgatcaaagagattacggagaaattcggaaagcttaacggaattattcacgctgcgggagtgatacaagaccgcttcctgctgcaaaaaacgaaggaagagttcagggaagtgcttgatccgaaagtgatcggaaccgcttatttagatgaagccagcaaagactgcaatcttgactttttcgtattgttctccagtgtttccggcgttctcggcaatgtcgggcaggctgattatgccgccggcaacgcgtttatggatgcatacgccgcttacaggcaatcccttacggagaatggcctgcggcacggaaaaacggtcgcctttaactggacgctgtggaaagatggcggtatgcaggcgggagacgagacggagagaatgatgaaaaaagttttcggcatggttccgcttcaaaaggcgtcaggcctggctgcattttatgaaggaatggctcaggaaaagccgcagcttttagcagccgaaggacacgcagcgaaattaaaacagtcgttcctgtccgtttctgaaactgaaaagccgcaggtgcagaaaatagagcctgtatccgccgtttcgggagacaaatggcacggtgcgcttatcagattggtcagttcaattttaaaagtcggccaagacgagattgatattgatacggaactgagtgaatacggttttgattctgtatcgtttaccgtctttacgaatcaattaaatgaagcgtatcagctggaactggcgccgacgatcttcttcgaacacgggacgatccgcagtttagcggagtatttgacggatgaggcagaagccgggcttccttctcagccggaagaaaaacacgatgcagaagaatctcttcaaacgcttcacaccgctttgacagccatggtaagcggcattttaaaagttgaccgtgaagacatagatacagatacggaattgagtgaatacggttttgattccgtatcgtttaccgtctttacgaatcaattaaatgaagcgtatcagctggagctggcgccgacgattttctttgagcacggaacgatcagcggtctcgccggatatttggcaaaagagcatccgggccgtttcggcgaaaagaagaaagagtctccgaaaaaagcgcagccaaaagcccaaaaaccgaaaatgcagcggaaaaagcgcttcgcaacggtaatgaacgctgcggcagcgacacaagagccgcgccgctttgacccggttgccattgtcggaatcagcggccgattcccgggcgcgaaggatatagaggaattttggcgcaatttgaaagaaggaaaggattcgatcacaaccattccgaaagaacgctgggattggcaagcgtttgatggcgacccgaatcttgaagggaacaaaacgaatatcaagtggggcggctttatcgacggaatagctgaatttgatccgctgttctttgggatttcaccgcgggaagcccaatatttagatccgcagcagcggctgttattgacttatgcatggcgggcgatagaagatgcgggctgtaagccggaaagcctttccggtacaaatacgggcgtctttatcggcaccggaaataccggttataaagatttgttcacaagggcaggtcttgcgccggaaggacatgcggcgacaggcagcatgattccttccattggtccgaaccgtttgagctatttgttaaatcttcacgggccgagcgagccgattgaaacggcatgttcaagctcgcttgtggcgattcaccgggcggtatccgctatagaaaacggagaatgcgacatggcgattgccgggggaatcaacacgattctgacggaagaagcgcatatcagctacagcaaagcaggcatgctcagcaaagacggaaaatgcaaaaccttctccaaagatgccaacgggtatgtcagaggagaaggcgcgggaattctgatgctgaagaaactgacagatgcagaacgtgacggcaatccgatttacggtgtgatccgaggtacggctgaaaaccacggcggccgggcgaatacgttaacctcgccgaatccgaaactgcaggctgatttattggtgaaagcataccggaaagcgggagtggacccgagcaccgtcacgtatattgaagcgcacggtacaggaaccgaattgggcgacccgattgaaataaacggtttgaaagcggcgtttcacgagctggcgaaaacacatcaagagcctgaagtctccggtcaccgctgcggcatcggttcggtcaaaagcaatatcggccatttagagcttgccgcgggagtatcaggcgtcatgaaagtgcttttgcaaatgaagcacaaaacgctggtgaaaagcctgcattgcgaaacgatcaatccgtacattcagctcgatgacagtcctttctacatcgtgcgggaaaatcaggaatggacggcagcaaaagatagaaacggaaatgccattccgcgccgggccggggtcagctcatttggcatcggcggggtcaacgcccatatcgttattgaagagtatgtcccgaaagcagccgctcagcctgagcacagcccggaaaatccggcaatcatccttttgtccgccaaatcaaaagaaaaactgtttgaacaggcgcagcagctgcaaaaagcgatccgtcaaacgccgtatacagatcaagacttggcgggcgtcgcttatacgctgcaaaccggaagggacgaaatggaagagcgcttggccattcttgcagcgacgatggcggaattggaaacaaagctggaagcatttacgaaaaatgagaaaaacattgccgggctgtataccggccagtctcaccgcaataaagatacgtttgccttgttcacggcagatgaagatatggacatcgtcattgacgcctggattaaaaaaggaaaattcgccaagctggcagaggtatgggtgaaaggcggcgtattgaattggaaccggctgtatgaaaagggtacgccgcgtttactcagtcttccgtcttatccgttcgcaaaagacacgtattgggtgcctgagaatcctgacaaaaagaaggtccatacagaggaacggatgaaacgtattctgacgaaacaatgggaactgagcccgctcgaactgggtgaaccgtgcgcacgttccgttgcgattttgacaggcggggacacgatcaatctcgcagaagagatcgcagcgcacatgccgaatcaccgtatcatcaccgcatcagaccttaccggtgaatatgactggcaggcgtttgacggagtcatcgacctcttcggcgcagcgaaagaagattctcaagacatggccggaatcaaatggcttcagcaattgattgagcatgggcataaagaagggatgacactgctttgtgtcacgaaagaccttgagtcattaaataaagaggccaatcaaacaacaggagcaaaacgggctggtctgtacagaatgctggcatacgagtacggtcacctgtcttcaaggcatctcgaccttgaaggagcgctttcggatgacaaactggcgaagcagattgccgatgagtttcatgcccgcactgatgacgcggaagtttgccggagggatggcttgcgctaccgcgccgtattgagcggatcagaaaatatgaatatgaaaggcgagagaattgattttccggccaaccatgtgcttctgatcaccggagggacgagggggatcggtcttttatgcgcacgccattttgccgaacattacggagtgaaaaaactggtgcttacaggccgcgagacccttccgccgcgaagtgagtggacgggcggactgaatggggtgacggcttctgtaaaagcgaaaattgaagctgttctcgacttggaatccaaaggtgtacaagtgaaggttttgtcagtcccgttagctgatgaagctgggctgagacaggaactgagtcagataaaacagacgctcggacctatcggcggcgtgattcactgcgcgggtgtgaccgataaagagacgctcgcattcatcagaaaaaccgatgaagacatacagcgcgtgctcgagccgaaagtagacgggcttcaggcgttatacagtgtgctcagcgaagagccgctgaagtttttcgtcttgttctcttccgtgtcagctgcgataccggcactttcggcaggacaggccgactatgccatggccaatgcgtatatggactattttgcaaactcatacaaagagcagctgccgatcgtaagcattcagtggccgaactggaaagaaaccggaatgggcgaggtaacgaacaaagcttataaagagagcgggctatacagcatcacgaatgcagaaggattacagctccttgacagcatacttcttgaatcagcaaggggcccggtgctgccggccgttctgaatcctaaactgtggaagccggagcgactcctgcggcggagcaggcaggatcagccaatgagtccggctatggtaaaaccggcggaaaaaaccgcttatactgccgcagacaacgctcaattaacaaagaaaacagaagaatggctgaaagaattattttctgaagagctgcggattgaccaggaccagcttgagacagacgtattattccaagattacggagtggattccattattcttgctcagcttctgcagcggatcaatcggaatctctcggcatcgcttgacccgtccattctgtatgaatatccgacgattcaatctttcgcaaattggcttctcgaaggatatacagaagttttgtcggaacggtttgatttggcggcggcggagcctgttaagaaaaagccggctgagccggtaattgaaacacaagccgttaaggtgcaagaagagccggccggaaaacagattcaccgggaagatatcgcggttgtcggcatgtcctgtcggtttccgggagcggcttccttagaggcgtactggtcgcttttggctgaaggccgttcggccatccgtcctgttccggctgaacgatggggtttgaagacgccttattacgcggggatgctcgatggaatcaatcaatttgatccggacttctttttactggctgaagaagatgtaaaggcaatggaccctcaagctttggccgctctggaagaatgccttaacctgtggtatcacgctggctatacgccggatgagataaagggagaagcaataggtgtgtatctcggcggacgcagccgtcacagaccgggtgaagagaaactgctggatgcgaaaaacccgatcgtcgcgctgggtcagaattatttggccgcaaatctctctcaatattttgatatgcgcggcccgagcgttgtcctcgatacggcttgttcttctgctttagtcggaatgaatatggccgtgcaggctcttgtaacaggagaaataaaagcggccgtcgtcggcggggtgagcctgtttgaatcagaagaaacccataaattatttgaacagcgcggcatattaagtaaagcgcagtcgttccatgtatttgacgaacgcgccgatggagtcgtgctgggcgagggtgtcggaatggttcttttaaaaaccgtgtctcaggcgattgaagacggagattctatttatgccgtagtgaaggcggcatccgtcaataatgacggaagaacggcaggcccggctacgccgagtctggaagcgcaaaaatccgtcatgaagacggctcttgaaaaaagcggaaaacagccggaagacattactcatattgaggcgaacggttcaggcacggtcgtgacggatctgttagaactgaaggccattcaatccgtctaccgttcaaaagacgccggcccgctcggaatcggatctgtgaaaccgaacatcgggcacccgctttgcgcggaaggaattgcaagtttcataaaagttgttctcatgctgaaagaaaagagctttatcccgtttttatcaggcgagcatgaaaatacacattttgatagagaaaaggccaatattcagttcagccgcactctggcagactggccgtcaccaataccggcggcaggaattaactgctttgccgacggcggaacaaacgcccacgtcattgtggaagcgtggcaggaagacgaagggcgccgaatcaagcgccatcctttaacaccgcctgcattaaataagcggctgatttcgccggacagcaaagaagaaacgaacgaaaaagctgcggcaaacatctgggatacctatgaagtggaggtttaacgtgaagaacttcaataagcaaatcactttatcgctgaaaaatccgtttattttacatcatgacgtttacggacaaaaagtccttccgggattggcttatattgatatgttttatcagattttcaaagagcgcggctattcatacgacgggcttcagctgcgccatttatccatatatcagccgcttattgcgaaagaagacagcgccgtcaagcttacggttgaatgtacaaaggtaaaagaagggcgctggaaacttaccgcaaaaggggctgaggtcagcggcggacgagtacagccggaagaacgtatttacgtcaaagcggaaatgcacgagacggcacccgcaattttcagtgacacgcttgatcttgactctgtcaaacgcggggcggaacgcaccatcgatttaaatgagctttatgcacaatgcagaagccaggaattggttcacagcggatatatgaaagcagaaggagaagtgttttccgagcgagacggcgtcacctttgatgtatcgctcggaaaagacgcgatgggacaggccggagggtttttgttccatccgactcttcttgacggaagcggcgtcggcgcaaacctattgatctcatcgctgttaaacggggaaaagaggctgtttctgcctcttttctacgaatcttttacagcttccgaacctttgcaggccggctgcatcacgagaatcaaacgttcgtcgcttcggcaggaaaaggagctcatttacattacactggagttttttaacgcatccggccggaaagtagccgagctgaaagatttcacaagcaagctcgtgcgggatgccgagctgatcaatacagaacgaaagactgctgagaagtctcctgaaaaagccggtttaccggaagttgcggcatcgcttgaaggcggacacccgcatgaggaagcagagaggtatgtcatgaatttgatggcggaaaaaatcggcaagccgcttgaacagattgattctcaagtcggctactatgaaatggggctgacatcgtccggactgcttgacgtcgtcgaaacgatcagcgaaaaaatcggcgaaaccctttctccgactttgctgtttgaatatacgacggcagcagagctggcggctttcctgactgagcagtacgggagccatttcagcgcgcctccggcaaaaatggcgaagccggttgagccgcaaacagaaaacaggcggaaaagcagtgttccgcaagatgaagatatcgcgattatcggcatggccggccgctatccgcaggccgaaaatattcatgaattctgggaaaacctgaaagaaggaaaaaactgtgtcaccgaaattccggagtctcgctgggactggcgccggtttgaaaatgtaaagtcgccttccggaaagagcatttcaaaatggggcggatttattgatgatacggattgctttgatccccaatttttccggattacgccgcgggaagctgaaacaatggaccctcaggaacggctgtttttacaaacatgctgggaaacgattgaggatgccggatatacgccgaagtcgctcgcagaggcgcgcggacggaataagagacagcgcgtcggcgtcttcgcaggggtgatgcataaggattatacgttggtcggggctgaagcttcttctgaagatcatgtattcccgctttctcttaattatgcgcaaatcgcaaacagagtttcatatttttgcaattttcacgggccgagcatggcggtcgatacggtctgttcatcttcgctgactgcggttcaccttgctgcggaaagcattcggcgcggggaatgtgaatcggcggttgccggaggcgtcaacttgtcgctgcatccgaataaatatctgacatacggtttatgggacatgttttcaacagacggggtttgtcatacattcgggaaagacggagacggctatgtaccggctgaaggaatcggtgccgtgttattaaaaccgctgcgagaggcggtaaaagacggcgaccggatttatgcggtgataaagggcagtgccgtcaatcacgtggggacagtgagcggaatttccgtgccgagtcctgtcgcgcaggctgatttgattgaagaatgcctggacaaagcgggcatcgatccgcgcacggtcagttatattgaggcgcacgggacgggaacttctctcggcgatccgattgaggttcaaggccttgtcaaggcgttccgccagtacacacaggacaaacagttctgttcgatcggatcagtgaagtccaatatcggccatgcggaatcggctgcgggcatcagcggcttaagcaaggttgccctgcagcttcaccataaaactttggtgccgtctcttcattcggaggagctgaatccgtatttagattttgaacaatcaccgttttacgtccagcatcataccgaagcatggcagcagccatcagtgaccgaaaacggaaatgagaccgtatatccccggcgtgcgggcatcagctctttcggggcgacaggttcaaacgtgcatctcattctggaggaatttatccctgaagaatcacacggaacaaatgctgaaccggcagaagaacagacattcatttttccggtttcagcccggaatgaagaacggctaaaagagtatgttgcgaagctgtctgcatttattcatcccggcctgccgcttgaggatgcggcgtatacacttcagatcggccgtgaacagatggaggagcgggttgcgttcaccgctcagaatatgacacagctcaaagagcggctggaaggctttctggcgggtaaaacggtcagcgggtgctggcggaaccgagctgataaaagcaaacaggcagagcttgctccggacttgatacataaatggctttcttccgggagtctggagatgattgccgaaaagtgggccggcggaggaacgatggattggaatctcttatacggagaaaacaacccgaatcggatcagcctgccgacgtatccgtttgaaaaaatccggtattgggtgccgaaggcggagaaaagagaatcgctgccgcaaaaaaatgcaggcatgctgcatccgctcctgcatgaaaatgtatcaaacatgtcaggcgtccgttttcggtcctcgtttagcggcggagagtttttcctgaaagatcacgtcgtcaaaaacgagcggacgttaccgggcgcggcttatctggaaatggtccgggcggccgttgaacatgcggcagaaacgaaggaagaaggaacagtccgtctgaaacatgtcgtatggatacgtccgtttacagcggcggatgagtccgcagaactgtatctccgcctttatgacgaagaaaatggagagatgggatttacggtttacagtgaatcggcttcctcggaagaagaacccgtactctatgcgcaaggaagcgcagcgtttgtccgagcgggcgaaccggtcaaaatcgagattggcaaattaagagagtcacgccgtctgatcacacctgacgcttgctatcaggcatacaaacagatggggattgaatacggggatgctcacaaagcggtcacggaaatctatgcaaaagacagcgaagtgctcgcgaagctctcactcccgtcatctatttctcatacaaaagatcagtttgtcctccatccgagccttttggatgcggccttccacgcgacaatcgggttaatgcttgacagagacgggactgacatacggccgatgctgccgtttgctctcgaacagattgatgtgttgaaaagctgtaaaagcgatatgtgggtttccattgcgtacagcggcgaaagtaagcctgaagatgccgtgcagaagctggatattgatgtatgtgacgaacaaggcaatgtatgtgtgaaaatgactggttattccgcacgggaaattgaaacggataaaacagatacactattttttgaacacgtatgggaagagaaggccgctgtacatgaagaagcgccgatccatttcaaagcccgtcacgtgatgatatctgaccggtttacggatcaaatgaacagcatacagacagacttcagctgtcatgtgctccgtgatcagcataagagtgaagacgaacggtttgaagcttgtgcgcttcaggcgttcgaagaagtgaagaaaatcctcgcttcaaattccggcgggcgcgagctcattcagattgtcgtgcctcaagaagcggatacgcagctcctttgcggcttaacggggcttttgaaaacagcggcgcttgaaaacccgaacttgaccggccagctgattgaattggagccggacgtcaaggcagacacgctgtcccgatatgtaaaagaatgcagcgctcaacctgatgacaagcatattcgctatgaaaacggcaagcgctatacggcacaatggcaggaaacagggcttgaacagttcggcgccgaaaagccgtggaaggataaaggtgtttatctgatcacaggcggtgcgggcggactcggatttttattcgccaaagaaatcgcccggcatgcaaaagacgccgttcttattttaacggggcgttctctgttggataaccgtaaaaaagcccagcttcaagaactgtccgatctcggcgcgcaagccgtgtacaaacaaacggacataacggaaaaacaagaagttcaatcgctcacagcggacatctgtcggcagtacggcggattaaacggtatcatacacagcgccggaacgataaaagacaactatattctgaaaaaacacaaagatgaagtccgtgatgtactggcgccgaaagtctccggactggttcatcttgatgaagcggcaaaggacattgagcttgattttctgattcttttctcttccggagccggaagcgccggaagcgcgggccaggctgattatgcgatggccaatgcgtttatgaacgccttcagtgaaaaaagaaaccgtaaaaaagcccgaaatgaacgctatggacataccctttcaatctgctggccgctttggaaagacggcggcatgacggttgatgctgaaacggaagccatgctgacaaaagaaagcggcatggtccctatgcaaacagaaaacggcattcaggctttataccgcgggtgggcggcaaacacatcccaagtcatggtgacggaaggctacgccgcaaaaatccgggcgtttctgaaaaaatcagcggatgatcagccggataagggcagcgaaacggaagaaacggcaggtcttacagcaggcggagagaacatgcttgcagaaaaaacggagcatttcttgaaacaagtgctttcggaagtgaccaaacttcctgtcggcaaaattgatgccaaggcgcctatggaagattacggaattgattcgattatgattatgcatttgacgggccggctggaaaagagcttcggctcattatcaaaaacattgtttttcgagtaccagaatatcgaatcgctggcgcagtattttatgaaagcacaccgggacacgctgctggaagtgaccggggtgaaaacagaagaaaccccagcagccaaaccagcgctgtctgagaaagcgaaagtaaagcccgttttcaaacggaatgaaggcaaaaaaggctttgcgcaagtccgtccggacacgcggaaaaatcagcagctgacagagcgtgaagatatcgcgattatcggtatatcaggacgatatccgcaggccgaaaatcttcaggaattttggaagaatttgagtgaaggcactgactgcataaccgaaattccaaacgatcgttgggatcacagtctttattacgacgctgataaagataaagaaggcaagacgtacggaaaatggggaggatttttgaaagacgtggacaaatttgatccgcaattcttctctatttcgccccgggatgcaaaattgatggacccgcaggagcggttattcctgcaatgtgtctacgaaacgatggaagatgccggttacacgcgcaaaaagctcacggaaaaatcgggtgatttgcttggcgccaatgtcggtgtttacgtcggcgtcatgtacgaggaatatcagctttacggagccgaagaacaggcgcgcggtaaatcgcttgcgctgaccggaaatccgtcatcaattgcgaacagggcttcctatgtattcggttttaacggcccgagcatggctctggatacgatgtgctcttcttctttaacagccattcatctggcatgccaaagcttgcggatcggggaatgcgaagcagcatttgccgggggcgtcaatgtatccgttcatccgaataaatatttgatgctcggccagaacagatttttatcaagcaaaggcagatgtgaaagtttcggagaaggcggggacggttatgtgcccggtgaaggagtgggcgccgtactccttaagccgctttctaaagcaaaagcggatggtgatcatatttacggcctgatcaaaggaacggccgtgaaccatgatggaaaaacaaacgggtattccgtaccgaatccgaacgcccaagccgcggtgatcaaacaggcgttaaaagacgcgggaaccgatccgagggcggtcagctacatcgaagcccacggcaccgggacttcactcggcgatccgattgaaatcacgggtctgacaaaagccttttcagaacaaacacaagataaacagttttgtgccatcggctcagcgaaatccaatatcggccactgtgaaagcgccgcgggcatcgccgggctgacgaaggtgctcctgcaaatgaagcataagcagctcgcaccgtcattgcattcccggacgcttaacccgaatattgattttctcgctacgccgtttaaagtgcagcagacgcttgaagagtggaaaagaccggtcataaatgaaaacggagtaaataaagaattgccgagaaccgcggggctttcctcattcggagccggcggcgtcaacgctcatatcgtcatcgaagaatattccgctgatgaggataaggagacggcttttgccgcgcctcatccgtcgatgatcgtcctttccgcgaaaaatgagcaacggcttcaaaaacgggcgaaacgtcttcttgatgcactgcggagcgggcgttaccgggaagcggatctgagccggatcgcatatacgcttcaaatcggccgtgaaccgatggaagagcgtctcggaatgattgtcagcaatttgcgcgagcttgaagagaagcttgacgaatttacgggcggcaaggagtcaattgaccagctctaccgcggacaagtcaaacagaataaagacacgatggcgctgtttacggctgatgaggacatggaaaaaaccattgaggcgtggcttgaaaaaggcaaagccgcaaaggtattagagctttgggtgaagggccttccgctgaattgggataagctgtatcaaatgggcagaccgcaaaaaatcagtcttccggcctacccgtttgcaaaagaccgatattggatcgacatatcagcagatgcagctgtcaaaagaccggccgaaacacagtctgcgccgatcgcaccggcggccgccccggaaccggtcattgaagtaacaactcttcacgacgagactgccaaagaaaaaccgtcaaacattacactgcagactttgagcggcgcgaaaccgaaaagaaccgtacagtctgtttcccgtccggcggtttccgctgaaaaagtaagtgccgtattgaccgaaagtttggcagacgttttatatatggatgccgacgatatcgacgcagacgacacatttattgatatcggcatggattcaattaccggtcttgaatggataaagtctgttaataaagcatacggcacgtcccttacggtgacgaaagtatatgattatccgacaatccgccagtttgcggctttcttgcaaaaagagctcgggacagaaccgatccttgaggaagcaaccgaaccgcagaaaacagaggccgtgaaaaaaccgtcaaacatcatgctgcagcctttaaacgctcataagcagcatgtgacacaagcagaagcggatattctggaggcgatgtctgaaacggcagcttccgccgaaccggaagaaccgattgaagcggtgcatgacgagttatcaaaagcactggctgatgtattgtacatggagcggcatgaagtagatattgatgaggcctttattgacttgggtatggattcgattaccggtcttgaatggataaaggccgtcaataaacggtacggcacggactgtaacgtaacgaaagtgtatgattatccgacaatccgtcaatttgccgattttctgagtacgcagccgtctgtccgcggaagaaaaaaacaggcggttcccgtacgtccaaagccgcttacgcagcaacatgccccgcaggagaaaacacctgccgagccggagagattaacggttcaaaaggaacctgaaccggtgcaggccaaacgggagcctaaagacgagatagcggacgcgatagccatcgtcggcatgtcgggcaagtacccggatgcgccggacctaaagacatattgggacaacttagcccgtgcgaaaaacgccattcgcgacatcccgctttcccgctgggatgtaaacaaatactatgatccggccttaaacaagaagggcaaagtatactgcagatcaatcggtatgcttgacggcattgaagagtttgatccgctgttctttaatatatctccgtctgaagcggaacttatggacccgcagcaccggatatttttacaggaaggttttaaagcctttgaagatgcgggttacagctcaaaagaattaaacgggaaaaattgcggcgtttatttggggattatgaacaatgaatacggcatgatgttaaacaaacatcagacaggaggaagcgcgacgggcaacagtttcagcatcgcggcggcccgcctgccttattatctcaatttgaaagggccggccattccgatcgatacggcatgctcttcatctctcgtcgggactcatttggcgcgtcaggcgctgttgaatcatgaaattgacatggcgcttgtcggcggtgtgaccttgtatttaacgcctgaatcatacatcagcatgtgtgaagcaggaatgctgtctcctgacggccaatgtaaagcatttgataacagtgcgaacggatttgtgcctggcgaaggcgcgggggcgctcgttttgaagaggctgaaagatgcggaagccgagcaagaccatatttacggagtcattatcggatctggaattaaccaggacggaaaaaccaacggcattaccgcaccaagcgcgaaaagccaaatggatttagagcgccaagtgtatgaagcgcacaacatccaccctgagagcatcacctatgcggaaatgcacggcaccggcacaaagcagggggatccgattgaattagaagccctgtcttctgtatttaaggaaaaaacggatcgcaaacaattttgcgccatcggttcggttaaatcgaatattgggcatacgtcggcggcggcaggtgtagcaagcgtccagaaggttctgctgtcgatgaagcatcagcagcttgtgccgacccttcatttcagcacgccgaatgaacattttgatttcgatgactcgcctttatttgtcaataccgaactcaaaccttgggaaacaggcggagcaccgcggcgggcctgtgtcagctcattcggctacagcggcacaaacgctcatctcgttatcgaagagtatcagccgaaagaccggggaagccgtaagcctgatgagacaaacatttttgtgctgtcggcgaaaaaagcgccccaggtaaaaacctatgccgagtctgtgatcgaatttgcaaaagccaatcagaatatcaatctttcagatatggcgtacacgcttcaaaccgggcgtgatgcgatggattaccgtcttgcggttacagccggttcgagagaagaactgatcagccgtttaaccgattttgtaaacggaaatacgggtgaagggatatatgaagcccatatcaaaacggctaaaaaagaactcaaagcatttgaaacggacgatgacctgaagcagcttgtgaggtcatggttcgataagaaaaaatacgccaaaatagcggaattgtgggccaaagggcttcagatggactgggacagactctatcaaggcgaaaaaccccacagaatcagtctgccggcttacccatttgcgaaggagccgtactggctgcctgagccgaaagccgtaccgcaggaaacagaagaccggcgcgaggctgtgcttttagaaaagcaatgggttccgtgtgagatcgattcggccggtgagaaaagcggcaggacggtcatgattctggctgatgtaagaacagcggagctagccgaagagactgcaaagcatttcactgactcattcattctcccggtcgattcggctgacactgcagctagcgattggaatcacatagatggcgcaatcgatctgacgggatgcggagacgaagacccttcactggaagggatcagccggctccagactctgattgatacaagccgccggcaggcgcggccgctgacgctgctatatgtaacaaaaggcttggagccatttcagcagaaaacgattcatcttgcaggagcggcaaaaagcggcctgtacagaatgcttcaaaatgagtatcaaaacgtgacgtccagacacatggatgccgatacagatacggatcagcagacgcttgccaaacagattgcagatgaatttgcggcggacagcacagaaccggaaatctgccgccgaaacggacagagataccgtgctttattcagggagattccaagcgggaagcgagcagaacataagcccgcaccgtttcctgaagaccatgtgcttttcattaccggaggcacgaggggactgggtctcttatgcgcccgccatttcacagaaaaacacggcgtgaaaaaagtagtgctgacaggcagggagccgattcctccccgtcataaacggtcagccgttaatacgaggctgaaagagaagatacgggcgattgaagagcttgaagcaaaaggagtgcaagtggcggtgatcagtctgaaattgtctgatcatgatgcggcggcagcggaaattgaaacgatccggcgcacgatgggaccgatcggcggcgtcattcattgtgcgggatctgttaattcagtaaatccggcgtttatcagaaagactgctgacgatatacaagaagtgctggaaccgaaagtcgcagggcttcaaacattaagcagccttttcacaaatgatcctttgcaattttttgtcttattttcttcagtatctgcagtcgttccggcgctcgcggcgggacagtcggattatgcgatggcaaatgcgtacatggattatttcgcggcggctcatcagcatcaatatccgctggtcagtattcaatggccgaactggaaggaaaccggattgggtgaagtccgcacagaaagcctgaagcagaccgggctgctgggactgtccaacgcggaaggacttgacttgctggaccgtattttatctgaaaacatccgcccgtccgttctgccggctatcattgatcggagcgaatggcatcctgacaggctgctctgtcaagagaaaaaacaaaaagagactgaagccgtaataaccggcaaagccgctgaaaaacattcagacagagaactgcttcttgatacgaaggcgtggcttgtgaaactgttttccgatgagctgaaaatcgctccggaagagctggaaacagacgaaccgtttcaggattacggggttgattcgatcattttagcgcagcttttacagcaaatgaatcaagcgctcaaagaggacttagatccgtctgttttatatgaacatccgacgattgacgcgtttgccgaatggcttgtatccaatggacagccgctgcttgcagaaagggaggaaccggatacagaaatcttggttccggctgccgtacaaacggttcatactgaacaaaagcgtgatgccgtaactgaagacattgccgtcgtcggaatgagctgccgttttccgggagcggaatcgttagaacaatattgggacttgctgagaagcggcaggtccgcaatcggctccgtcccggcggaacgtttcggatatgcaaatcaatacgttgcgggattgattgacaatatggatcactttgattccgaattctttttcattccggaaaacgacgcgaaagcgatggaccctcaggcattggcggtgttggaagagagcttgaaactttggtgccatgccggctattcccgtgaagaaatcaagggtatagaggccggtgtgtatatcggaggccgaagccagcatcagcctgatcctgaaattcttgcgaatacccgcaacccgatcgttgcgggcgggcagaattatttagcggcaaacgtttcgcaattttttgatctgcgcgggccgagcatcgtgcttgatacggcttgttcatcggctttgacaggaatgaacatggccgttcaggcactgagaagcggcgatatcaaagcggcggtagttggcggcgtcagcctgctgaacacggatgcggcgcaccggatgttccaagagcgcgggctgttaaacgaaaagccggcatttcacgtatttgacaagcgttcaggcggagttgtcctcggtgaaggcgtcggcatggtgctgttaaaaacagtaagccaggcgcaaaaagacggcgacacgatacacgcggtcattaaggctgccgccatgaacaatgacggcagaacggcaggcccgtcagctcctaatatgcaggcgcaaaaagacgtcatgcaaagcgcgcttttcaaaagcggcaaaaagccggaagacatcagttatatcgaagcaaacggatcgggttccgctgtaactgatttgcttgagctgaaggcgattcaatccgtataccgctctggccagcatgttccgctcggcatcgggtcaattaagccgaacatcgggcatccgctttgcgcagaaggcatcgcaagcttcattaaagtcgtattaatgctgaagcataaacaaacggttccgttcctctcaggagatgaaccgatgccgcattttgatataacaaagacagattttcattttcataaaacagccggcgaatgggatgcatccagaccgtcagcagccatcaactgctttgccgacggcggaacgaacgcccacgtcattctggaagcttgggaagaaaaagacacccgaatgaaaagaaagccgctgccggtaccgtcattaagacgtaaggctctggtaaaagagcctgacgcaccggcggagaaacaagagcttcctgcgaaaaaaatgttttggaaagcatttaaatgagagaggagtgggaaggaatgatatcggaaaaaatcaatatctcactggatcatcccatcatgaagggccatatggtctttggtgaagcggtattgcccggtcttgcttatatcgatttgatttatcaggtttttcaggaacacggttatgtatacaatgagctcgaattgaagcacgttacgatttatcagcctttaaccgtcagtgaaacggctgcaatcattctgaccattcaatgttctgatagcggagatggaaagtggctcatctccctttcagggcagaaacagcaaggtgacgagctgtcagacaatatacaatatgcgacagctgaaatggtgaaaagagacgctgtgacatttgacgaaaccattgatttcggcgatgtgaagcagtcaggcagatctctgaatcttgatgacatgtataaccgctgcctggatcatgacttggttcattccggcatgatgaaatcgaacggacgattgtacgaaacagaaggcggcatgctggctgagctttcttgcgaagaaggaaaagatttctttttattccatccggcccttttggatgcgagcggaatcggggcgagcggtttgctttctgaaacaaaccggcttcatctgcctttatattatgaatcgttcacggccgccgacaggctgcaatctgagtgcacggcgcgtatcgccgcttccggcgtccgtcaggaaaaagaactcacaacgatgacgatcgagtacttcagccgatccggacaaaaggtggcggagcttaaaaacattacgggaaaagcggttcggttcgaagaagacgagaatacagccgaacagaatcaacaggctgcaactgagccggaaagcacagatgaaaaagacatcattctgtttttaaagaagcttttggctgataagcttgggcagccttgggagacgctggacgttcttgcaggctactatgagcttgggctggattcatcttctttgcttgagattgtacaggatatcagtaaaaagacgggtgcggacctcgcgcccactcttctctttgaatatacaaatataaaagaactcgcagcctatctgaaaaagaccgtttcatttgaatgtgcggaacgtgcagccgaaccatcacggtctgaagctgaagcgccggacgcgccagaacatcataaaaacaccggagacatcgcgattatcggaatggccggccgctatccgaaagcgaaaagtgtggcggagttttgggaaaacctgaaggcaggcacggattgcatcactgaagttccgaagtcccgatgggattggaaaacatatcaaaacgtaacgtccccgtctggaaaaacagtatcaaaatggggcggtttcattgacgatgccgactgcttcgatccccagtttttcagaatctcaccgcgtgaggcggaaacgatggacccgcaggagcgcctgtttttagaaacatgctgggaaacgattgaagatgcagggtatacgcctgaaacgctgggaaataaaggggagaaacagcatccgatcggcgtatttgcaggggtgatgcataaagattattccttaatcggcgcagaacaattatctgaaactgatccttttccggtttcactgaattatgcgcagatcgccaacagagtgtcctattattgtgacttccacgggccgagcatcgcggtggataccgtttgttcctcatcattgaccgccgtccatctggccatcgaaagcatccgccgcggcgaatgtgaggccgcgcttgcgggaggggtgaacttgtcgctgcacccggcgaaatatctcagctacggaagcgtgggcatgcactcaagtgacggccgctgccgtacattcggcgagggcggggacggctacgtttccggagaaggagtcggtgcggtattgctgaagccgctggaaaaagccgaacaagacggcgaccgcatttacgcggtcattaaaggaagcgccgttaaccacgtcgggaaagtaagcggaattaccgtcccgaatcctgctgcacaggcagaagtcattaaggcctgtctgaaaaaagcaggtatcagcccgcggaccgtcagttatgtggaagcccatggcacaggtacttcgttaggagacccgattgaaattgaaggtctgtcaaaagcgttcagccaagggacgcaggatcagcaattttgttccatcggttcggtcaaatcaaatatcggccacgcagaatcagcggcggggatcagcgggttaacaaaagcggcgctacagcttcatcacaaaacgcttgtcaaatcactgcattctgcggaattaaatcctcacctgaaatttgaggaatctcctttttacgtacagcagcagactgctccgtggaagcagccgtcagctgaagaaaacggtaaagtcacacattatccgcgcagggccgggctcagttccttcggtgcatcaggttcgaatgcccatatcattttagaagaatacattcagcctgaacaaaaagcgcttgcacctgaaaacgaggcagcaaaactcatcccgctgtcagcaagaaataaagacaggcttctggcctatgcggaaaaactagcccgatcgctttcagaaaagacggtgctgtctgaactggcttatactcttcagacaggacgtgaagcaatggaggagagagctgtcttccttgtaaatgacatccgcgacttgaaagaaaagctgaatgatttcgtaaaaggaaacgaaaacatccccggtttatggcgcggacaagctgagctgccggagatgagcgaagccgctcccgagacggacgatccgaaacggcttgccgcgttatgggcagaagggaaaataatagattggaataagctgtacgcttcgggtaaaccgcgtaaaacaagcgttccgacttatccgtttgcaaaagaacgctattggattccgcagcagaaaaaacaggagaaaagcctgtcaggcacagtactgcatccgcttttacaagaaaatacgtcagatttttcgcagcagcgcttcacgtctctttttacgggagatgaatttttcctatctgaccatgtcgtcaacggacaaaaaatattgccgggcgtcgcctatttggaaatggccgcagaggcggtcaaaaaggctgctgccgtgacggaaaaagaccatagcgtcacactcagacaggttgtttgggtccggccggtcatgattgaagacaaaccgaaggaaatacatattgccctttacccagaagataatggtgagattacctatgaaatatacagtgaggcagaaaacggcgaagatccggttattcacagccagggtgaagcggtcattaccgaaccgggcagcgcccagatagatatcgagtctgtcaaagcttcctgcaatttaggaatcgtgactgcggaagaatgttacggtgcttttgagaagatcggtctggattacggagaggcatacaggggggtacagcaattgctgctcggagaagaccgattattggcccgtatttcactccctgctgccgtacatgacaaaaaagaacagtatacgcttcacccgagtatgatggacgccgcttttcacgcatccgtcggtctgcttgtccgatcgatacatgatgatgcagacagccacgagctttctttgccgtttgcgatgcaggaagtggaagtgttcggaccgtgccctgaacatatctggtcatatatccggtacacagaaggcagcaaagcagatgacaacgtaagaaaatttgacattgatatgtgcgatgatgccggtacggtttatgtccggatgaaaggcgcgtccgtccgggcgcttgacacaagccaaacagcgggcggagaaacctcggaggcgcctgtcggccatacgatgctgattccggcttgggagcctgttgcgcttgaaaaagccggggaagcagcggcggataagcagacggcagtattcggcggaacggattcgagacatacgcgcataaaagaacatctgccgaatgcttcctattatccgatcagaggtacggatgatatcacatctcttacgcacatgcttgaaggacaaaaagaactggagcaaatcatttggcttgctccgcaggctgagagtgcggacagcctcaaggaacaggaaagaaacgttcttcatgtgttcaagctgatgaaagcattacttgccttagggtacggagaaaaacgtttggactggtgcatcgtcacagcaaatgcccagccgttttcggatcaagacagcgccgacccgtcacaagcggcagtcagcggacttgccggaacaatggcgaaagaatatccgcattggcatatccgcatgattgacacagaaacggacggcagctggccgatcgaagaggcgctcagtctttctgccgggaaaaacggtcaaatttgggcgtaccgcaatcagcagctgtttgagcggcaactgataccgcttgacaatatgccgaaaaacggcacgctgtaccaaacaggcggggtttatgccgtgatcggaggcgcggggtatcttggcgaggcatggagtgaatacatgatccgccgctacaaagcacgcatcatttggatcggaagaagcacactgaatgattccatacaggcgaaactcgaccggctcagcgcattcggcccggcgcctgaatatgtttccgccgatgccgccgacagtgcttccttagagcgggcttatcagttcataaaagagcgccacacaaaaatgaacggaatcatccactcggcaatggatctgtctgagcaaagcttaaataatatgaagacagaagagttcaaatcggtgctgcgggcaaaagccgatgtaagtgtgtccatggcggaggtatttggacgggagccgcttgactttgcgctctttttctcctcgcttgtggcatttattcataacgtgaaacaaagccattatgccgcgggatgcgctttcagtgacgcatttgcgaaagaacttgatcagacatggaattgtccggtcaaagtgatgaattggggctattggggcaacagcgaagcggctgaagacggtgattttattcagctgatggatcagatcggattgggattgatcgaaccggacgctgcaatggaggcgcttgaaacccttatgacgctgccggttgatcaggcggctttcattcatacgacaaaaccggtcgcagtcgaagggatgagtgaaagagaaaaaatttccgtttatccgcctcagccgcttgtcttttcacaacagccgaaggtcgctccgcccggcgcacgtcttgttagagaggctgaacatcaggagctcgatgattatctgtatcagctgttgatcgcccagcttaaagaagcagacttgctgacgccgcaaagccttaaagcgtatgagcccgaacatgaatactttaaaaaatggctcaatcaaacgatcgctttccttctggaacatggctatctggaagggaatgcggattcatataaactgtcggcgcgagccgaaaacacaaccgcctcgctatggcaaaaatgggagcaggaaaaagaggaatggctcaacaacgccgatacaaaagcgatgactgttttagccgagacgatgcttaaagcactgccggacattctgcgcgaagacgtgccggcgacagacatcatgttcccgcactcttcaatggaacttgttgaaggaatttataagcgcaatcaagtcgcggattactttaacagcgccctgtcagatacattaacggcttatgtgaaagaaaacatcagcaaacattcaaaagccgagatccgtatcctggaaatcggagcgggcacaggcggcacaagcgcaggcatatttgaaaagcttaggccgtatcaaaaccatataaaagaatactgttacaccgatgtatcaaaagcttttctcgtgcatgcggagacggaatacggcaaacggaatccttatctgacgtataagctttttaacgcagaagcgccgcttgccggccaggacatagagccgggcgcattcgatatcgtcgttgcggccaatgtgctccacgcgacgaaagacatccgccagacgctgagaaacgccaaagccgttttaaaagacaacggtttgctgctcttaaatgaaatggcgggaaacagcctgttcccgcatattactttcggactgcttgaaggctggtggctgcatgaagattctgcccttcgtattccggggtgcccgggcttgtatccggaaagctggaagcgcgtgttagaaagtgaaggctggcattctgtctttttcccggcagaagcggcacatgaattaagccatcagattatagcggcaaaaagcaacggcattgttcgccaaaaaacgcttaaagcaggggccggaaaacggacctctccgccaaaagcagcacatgcgccggaacttcaggcgcaaacaacggtgcaaaaaggcgacacgtctttaacagaaaaaagcaccgagtacttgaaaacgttaatcggagaaacattaaaaattccgccggctcaaattgatccgaaagcgccgcttgaaaaatacggaattgattctatcgtcgtcgtacagctgacaaacgcgttacgaaatgtattggaccaagtcagcagcactttattttttgaatatcagacgattgaggcgctcgtcgctcacttaatcaaaacgaaaaaagacgcgatgatcaaactgacgggacaaacgcctgttcaggaagaacggaaggcatcaccaaaacctcaggctgtacagcctgctaagccgcttcacactgactggcggcggagggaaaaacgggcagccaaagagaccgtccggcaaagttcggttcgcgacgtggccatcatcggtgtttcaggacgctacccgcaggcaaaaacagcggctgagctttgggctaatattaaaaaaggaaaaaactgcatagaagaaatcccgcgggaacgctggaactggcaggattactacgatgaagagaaaggtaaagaaggctctatttatacgaaatggggcggcttcattgaggatatggacaagtttgatccgctgttctttcagatttctcctttggaagcggagcgaatggacccgcaggagcgattatttttagaaacggcgtatgcgagtatcgaggatgccggctatacgcctgacaacctgtgccagagcagaaaaatcggtgtttttgccggcgcgatgaacaaaaactacccgacaggctacggctattggtccattgccaacagggtatcttacctttttgatttccaagggccgagcattgccgttgatacagcctgctcctcttctttgacggccattcatctggcgcttgagagcatatacagcggttcaagcgaatgtgcgattgccgggggcgtaaacatagtgaccgacccgatccattatatgaatctgtcagtcatgaacatgctttccgcaggcgacacgtgcaaatcgttcggagaccgcgcggatggttttgtcgacggagaaggggtaggagcggtcgtattaaagccgttggaccgagcgattgccgacaacgatcacatttacggtgtgattaaaggaagcaccattaacagcggaggcaaaacgaacggatacaccgttccgaatccgaatgcgcaggccgccttaataaaagaagctttcgaaagggcaaacgtcccggcgcgcaccgtcagttatattgaagcccacggtacggggaccgcattaggagatccgattgaaatcgccggattaacgaaagcatttgaagaggatacaacagacaaacagttttgcgccatcggctccgcaaaatcaaatatcggccattgtgaaagcgccgcgggcattgcgggtctgacaaaaatactattccagctcaaagaccgccaaattgcgccgtccctgcacgcggaacagctgaatccgaatattgatttcgcgtatacgccgtttgccgttcagcaggagctcggtgagtggaaacgtcccgtcatcggcggccaagagcttccgagaagggcggggttaagcagcttcggcgcgggaggagcaaacgcccacctcgtcatagaagaatatacggcagacaaagaacctgatgagacgccggcagatcagcccgccatcatcgtcctgtccgcgaaaaacagcgaacggctcactgaaaaagcaaaacagctcagagacgccatccgtgaaaaaagatacagcggcagcgaccttatgagcatagcctttactcttcagacgggccgggtgccgatggaagagcgtcttggttttatcgtccattcacttcatgaacttgaggaaaaactgaatgggtttaccgccggacaaaacagcgccggactgcaccgtgacggcacggaagaaaacaaacggatgcttgccgtattttcggcggatgatgatctggaaacaatcatagacgcttggatcagcaaacggaaatattctaagctgcttgagctttgggtaaaaggattggacatcgattgggcgaaattatacggagaccgtcctccggcccgcatcagcctgcctgcttatccgtttgcgaaagaacgcttctggcatcagcagcctgtacaaagcaaggccgcgcccgttaaggcgccggctgatgaaagtgatccggcggaacagtttgaagtgatggcttttagagaagttcttaaagaacaggctctgccggctgccggagaaaagcaagtcaaaacggtgatttctttcttatctgatcagaagaagcagcaggaagccgtctctgtgatcaaatcgtatgacagtggcattggcgttatttttatcgctcagggagaccggtatgaggctctgtccgccggccgctgccaagtggtgcgggaagatccgcaatcatatgtgaacgcttttgcggatattcaaaaagagtacggtgaagcttctgccattttgtatttatgggcgcttgaagataaaagctgcatcgaagattattcatgtatcgtccatattctcaaagcaatggctgagaccggtctgcagccggaaaggctgttattggcgggggaatatgcatccggtctggaaaagtgctacttggaatcatggatcggctttgagcgttcgctcggcattgttctcccgaaaacaagtgttaccggccacttcagaaaagccggtgcggccataacggactggatgaggaccatttgggacgagctgaaagctgaaacagaccaaaccgttttcttggaagagggaaaacgatatgtctatcacaccgaaccaaccggactaacgaaagaaaacagcaggatcagaaccggcggaacatatctcattacaggcggattaggagggctcggctacttatttgcccgccatctcgcccggaactaccaggcaaatgtcattctcacggggcggtcgccgatcaatgaggaaaagaaagaaaaaatgaaagacctggaaaatctcggcgcgggtgttctttacgccgaagccgatgtttgtgatccgatcggaatgggcgactgcatcaagcgcgcgaaagaacgattcggagccattcacggcgtcattcatgcggcgggcatcgaaagcagaacatccgtctttgaaaatgaaatcgggaatttccgcagtacgcttgaaccgaaaataaacggaagcctgcttcttgacgagtggctgaaaaacgaaacgcctgatttcatctgctacttttcatccacatcggctgttttaggagatttcggctgctgtgattatgcggtcgcgaacaggttccaaatggcgtatgccaactataaaaacgaacaatcagaaagcggaaacgcttttgtcatcaactggccggtctggaaaaacggcggaatggccgtcggcggtgaagagacgacgggcatgtacctgaaatcaagcggccagcgcctgttagaaacagatgaaggcattgagctttttgagcgcatcatttctcaagataacacccagtgccttgtcattgccggcgaaagaagccgtgccgaacgatttttaggcatacggcgggacgattcatcaaaaccggatgcgcttttggaaaccgtgagccgccgcatcccggaagaaagcacggaaaaacggctcgaagcggatttgaaagagctgatacacagtctgctgaaaatatccaaagataaactcgtcctgcataaaaactgggcggaattcggatttgattccatctatttagccaaatttgccgctcttttgacgagtcattacggcattgaagtcactccggcgttattttacagctatgccacgctcggagacgtcatcagctattacttgacagaacataaagaaacgatcgaaacgttttaccgaacggaagaaaccgaaacagaagccgccgctccggaaagcaaggagtatacggatcaggagatcatcgccatgatgaaacaggtctctgaggggacattagattttaaaagagtgcaagacatcatagaagggagtaagacctatgaatcataaagaacttctcgatgcctacagatcaggaacgctcaccatcgctgaagtagaacaaaagcttcaggctttcaagcggacaactgcaaaacgtccgctttctgaaggccagaaaggtttgtggatgcttcagaaaatgtttccggagatgagcgcatataacattccgttatgctttcgttttcaaaagctggatatcgagacattcaaaaacgcccttttgtccgtgcagcgccagcaccctattttgaccagtgtgataaaagaggaaaacggccttccgtatcagatagaagatacggatcggcattttccgattgaagaaatggatctttctgaattaagcgggcgtgatgcgcttacgtttattaaagaaaaagcaaaagaaccgttctcgcttgaaaccgggccgctcctgcgtgttcaagtattccggcgggcgaagcgggagccgattgtgttaatcaccattcaccatatcatttttgacggcgtctctcttatgacgtttatgtcggcgctgctggacgcttatgtaaaagcaagcgaaggcaaagaacctgtcatgcttcagcaggccgcagattatcatgactttgtgaaatgggaaaaagagctgctggaaagcgcagcgggaaaaacgcatctctcttattggaaaaagcagctggaaggaccgctgccggtgcttgagcttccgtcggattacccgagatcatcggtccaaacgtgcagggggcaggcgtatcagcgcttgcttcctgatgaactgaaccggcagattaaagtttgcgcccaaaaacataatgtcaatgaatccgttgtgtatctcgctattttcaaaggactgctctatcaatatacgaatcaggaagatgtcatcgtcggcatgccgacgatggggcgttctgaggctcaatttgagtctgtcatcggatacttcattaatatgatcgcggtcagaagcagggagacgggcgccaaatcttttacgtcgtttttgaaggagctgcagctgacactggcagaagggctggaccatgccgcgtatccgtttcccgcgcttgtaaaagaattgaagacggaacgctcgcctgcggtgtcgcctgtttttcaaaccgcgtttttctatcaaaacttcttccggacagaaggagcggaaaagctggcggaactatatcaatcactcggcattgaaatgatagaagacattcatcaggaaggcgaatttgagcttgcgcttgaagtctataaaaaagaaacgggaaccgtcctgcaatttctgtacaacccggatgtctacagcccttctttcatcgaacgaatggcggagcattatatgaaactggcagaaaaggtgctttctgatccggagatcgcttttgaagcctgttccggcctgctcaatcaaaaacgggatgaaagccgttcatcccatcagccgaatgagcgctgcattcatgaagtgtttgcggaaaaagccggacgccaccctgacagagaagccgtcacattcggtgaaaacagtcttacatatcgcgaattagatgaacgaagcacggcgctcgctgtgtacctgcaagaaaagggcgtcacaccggaatgcccggtcggcatttgtacggagcgttcttttgagatggtcatcggcatcctcgccattttaaaagcgggaggcgcgtatgtaccgctggacccggcttttccaaacgaacggatggcccacgtgttgactgacagcggcgtgtcaatcgtattaacgcaggaaaagacgcgcggcatgattgaacagttggccatcggcggtgtgagcacggtggaaattgaaaacagcggacgttctgtcagcggggctaaactgacgccgcgttcaaaaccgcatcatctcgcttatattctatatacgtccggaagcacgggaaaaccgaaaggcgtcatggttgagcacagagccatcatgaatacgctgcagtttttggaagctgagtatccggtcgcacaagaggatgcctatctgttaaaaacgaattacgtatttgacgtttcgatttctgaattattcggctggtttatcggaaacggacggcttgtcattttgccgcctggtgcagaaaaaaatccgcagctttgcatggaatatatccaaacccaccaggtcacgcatctgaattttgcgcccgccgtgtttaatgtatttctggaaacggtaaagcggcatacggcatttacagaagacggccctgtgaaatatgtgatggtggccggagaggcgtttccgaaagatttagttaaaaagtcagtttccatcttcaaacatgcgagaattgaaaacatatacggcccgacggaaacatccatttatgccgcttactacagctgcggccaaaaggaaatcacaagcaggaatacgccgatcgggaaaccgattcacaatacgcggctttatatcgttgatgaaaagctcagccccgtccctgacggtgtggccggggagctttgcgtggccggcgccggtctggccagaggctattacaatcagcctgagctgacggcggcatcatttattgataatccgtttagtgaaggagaaaaactttacaagacaggtgatttggccagatggctgcctgacggaaatatagaatatgccggccggattgacagtcaggtgaaaattcgcggcttccgcatcgaattgggagcgattgaaacgaaattgagcgaacatccggacattcttgatcaggcggttgtggttcaggaaaagaacggacataaaaagctgattgcttattatacggcccgctccggtcatacggcagacgaaaaagcgctccgcaaccatcttttatcgagtctgccggattatatggcgcctgcccattttatccgcctggatgcactgccgttaacaccgagcggaaaagtgaaccgcaaagacctaaaacagcgcaaggtaatcgttcaccggtctgaaaagacgggcagactgccgttatcagaagcggaagcgaaagtgaccgcaatatgggaagacctgctgaatacggcgggcatcaaaatcgaagacggctttttcgatgtgggaggcgactcgcttctggctgttgcggcggcagaacgcattaaacaggagctggaatgcgattttaccgtcacggatttattcgaacactctaccattcaggcgatcagccgatttattgttgaaacaaaacaggcggctgaatcagtggcgcccggccaagatgagagagaaagagaacaaacaccgcaaaacggggtgccgtcttactttgatgacagtgtggcaatagtggggatttcctgccagttccccggcgcgaaaaatcatcatgagttttggaagcagttaagagaaggaaaggaaagcgtccggttctactcggaagaagaacttcgggaagccggcgtgcctgaagatttgatcgaaaatcccgactatgtgccggcattatcgacgatagaaggaaaagatctctttgaccctgagttctttcacatttctccgaaagacgcagaatttatggatcctcagcttcggcttctgctgcttcattcttggaaagccgtcgaggacgcgggatatgtatcgaaagagattccgaagacaagcgtttatatgtcggcaagcaataattcgtatcggtcgcttttgccggaaaaaacgacagaaagccatgaatctcccgacggctatgtgtcatgggtgttagcgcagagcggcacgattccgacgatggtttcccataagctcggattaaaaggaccaagctatttcgttcattccaattgctcatcatcattagtcggtctttattcagcctacaaaagcataacgagcggagaatcggaatacgcgctcgtcggcggagcaactctgcatgcagcgaccggcatcggctatgtgcaccaaaacggattgaatttttcaagcgacgggcatgtcaaagcatttgacgcttcagccgacggtatggcgggcggagaaggagctgccgtcattctgctgaaaaaggcgtcacaagccgttcaggacggagatcacatatacgccatgctcagaggcatcggtctgaacaatgacggagcggataaagtcggtttttacgcaccgagtgtaaaaggtcagactgacgtcatccagcatgttttagacagcacgaatattcacccggagacgatttcctatatcgaagcgcacggcactggaacgacattgggtgatccgattgaaatgtccgcgttgcagcaagtgtataaacgttacacggaccgggagcagtattgcgggatcggctccgtaaaaacgaatatcggacatttggatacagcagcaggtctggccgggtgcatcaaagtcgccatgagtttatatcatcgggagctggcgcctaccattaattacacgtcaccgaatccgaatatcaaattcagcggttcgccgttttatgtggcggataagagaaaaccgctgccggagagagagacgccgcaccgcgcagcgttaagctcattcggactcggaggaacaaacgcacacgccatttttgaacagtatgaaaacaaaacgatcagcggatcaaatgacggacagccgccttatatcgttccgctgtcagcgagaaataagcagcgtcttactgcctatgcatcttgtttatccggctttctggatgaagccgaaaacgatgtttccttgcatgatctggcatttacgtatcagaccggacgtgaagcgatggaagagagagccgtttttatcagtcatgatcgtcacgatttgaagcgtcagctgcaggatttcatcaacggcaatgaccaaaacatcttacggggcgaaaaagtgagaagcagagaagtgtcagctcaggagatggaagagcttgcagcatgtcagacacgggatgaaaagctgaaagcactcgcggcgctctgggttgaaggagcgcgtgtcgattggggcttattgtatccggattccgcgccgcaaagaatcagtgcgccgacctacccgttcgcagaagagcgcttctggccggaagaaacggtgaagcaaacggataccaaacttttgcatccgctggtacatcagaatacatccgtcttgcaggagcagcggttcagttcggaattcacgggaaaagagtattttattgccgagcatatcattaaaggaatggcgatcgtgccggctgccgttacccttgagatggcacgggccgcggcggagaaaagcatcggcggggcaacagaggaatctctgggcctgcgcttaaagaatattgtatgggtccgtccggtgatagccgatcaggaggctgtccgtgtccatatcggactttatgaagaagaggacggacagattcaatacagaatgtacgggggtaacgattctatcggtgaagaagctcctctttataatcagggcatcgctgaaatcatccggaaggaaccggaggaagcggcggatattgagcagctgaagcgccgatgcacgcagggaacaatcgaatctcaagcgttttacaaaggaatgattggtgctgattacgggccgggttacaaaggggtgcagcttgtatacaaaggcgaagaccggctgcttgctaaattgaagcttcctgaatccgtctctcatacaaaagctgattatatccttcatccgagtatgatggacggtgcgcttcaggccgccgaatatttgcaaaacgtgacgagagcgctgcttgcagaaagcggggaaccattcaaagccgcattgccgtttgctttagaggagctggacgttctgaatccgtgcgctgatgatatgtgggtgcacgtcacattcagtgcgaacaataaagccggcgatcctatccaaaaagccgatattgatttatatgacaataacggcgggctttgtgtgcggatgagaggtttctcaacacggatcatggaagaaaacgcgggtgccggcgtttcggtcagccgtacggacacattgctcgctgaaccgatctggaaagagcagccggaaccggcggaccacgagccaacgtatgaagagcatattattttcctttgtgagtacgatgaagccgtaaaacaggccgtggaagcaaagcttgaacatgcaagcgtcattatcttggacgatcgtcccgcatctattgcagagcggtatcattcttatgcgggccagctgtttgaccatatcaaaaccataatgaaaagcaagccgaagggccgcgttctttttcaggctgttacgcagtcagcaggcttacagcaggtgttctcaggcattaccggcctcttcaaaaccgcatgccttgaacattccaagctgatctgtcaaatgatcgaagccgaggagaaagaaagtgctgaaggcatagcggaaaaagcgtccgaaaaccgtatgcatgccgaaagcgtccatgtgaaatatgaaaacggcaagcgctttgccgctgattgggaagagatggatatttctcaagcggagccggatattccgtggaaagacgaaggcgtttatctcattacaggaggtgcgggaggtttaggtctgatctttgcaaaagagatcgcaaactgtacaaaagatgccgtcatcatactaaccggccggtccgctctcagagaaaagcagaaagacatgctggaaacagtacgtgctgccggcgcttctgttttctacgagcagaccgatgtcacggacgaagcagaagtataccgattgatccgcaatatccgcaaacggcatggcaggctggacgggattgttcacagtgccggcattataaaagacaactacatggtgaagaagacggcagaggaattccaacacgttctcgctccgaaagtgaagggtcttgtgtatcttgatgaagcgtcacaacatgagaaattagatgtctttattgtcttttcatccttatcaggtgtgcttggaagcgtcggccaggctgattatgcgtctgcaaatgtctttatggagatgtatgccgagtaccgccgttctttacaagccgcaggacaaagatacggaaagacgctttctgtcagctggccgttatggaaagaaggcggaatgcaggcaggaaagcagacggaagatatgctgatgcaggaggcgggaatcgcaccgctcggcacagatgccggcatcaaggctttatatcaaggcttgatgagcgggacagcccggatgacggttcttgaaggagatgtgaaacacatgaaagcaaaactgttccgcaaagagaatgatcatccggaagcagagaccggcgtacgtcatgacattgatgctgacagcctgcttgaaaaagtgaagcatctgttaaaacagcagacggcctcactgttaaaagtaaacattgacaaaattgatcctcatgaagaaatgacaaaatacgggctggattccatctcgatgactgagtttacgaaccagttaaacaaaacgtaccggcttacgttaacgccgacgattttctttgatcatccgacaatccatgaatttgccgttcatttaatcagtgaatacgaagaggaatttgccggacggtttgcggtaaatacaaaaacggttcaatcggcaagaccggtaaaagagactcaaatcacgcgcccggccgttaagcgacgacgcactctgcctgagacacttccgcagacagtgcagcggggccaagggccggaaccgatcgcaatcgtaggcatcagcgggattttcccgatggcagaagacattgaagctttctggcagaacctgaaagaaggcaaagactgcatgaccgagattccgaaagaccgctgggactggcgggactattacggggatcccgcaaaagaagccaataaaacaaacgtcaaccaaggcgggtttattgacggaattgctgaatttgatccgttatttttcgggatttcaccccgggaagcggagcaaatggaccctcagcagcgcctcttgctgacgtacgcgtggaaagcgatcgaagatgccgggtatgcgtcaaagagtctctcaggcacaaaaacaggtgtgtttatcgggaccggaaataccggctacggttctcttttagccaataccgatgcggcgattgaagggtcatccgcggcgaatacaagtccgtctgtcggaccgaatcgtgtcagctatacgctcaatctgcacgggccgagcgaaccgattgataccgcctgctcaagctcgctcgttgccatacaccatgccgtttcttcaattgaagaaggaacgtgcgacatggctttggcgggaggaatcaatacgattgttcttccggatgtgtatatcagttttgacaaagcgggcgcgctgagtaaagaaggaagatgcaaaacgttctctgatcgggctgacggttttgcccatggtgaaggagccggtctctttttcctcaaaaagctgaaagccgctgaggcggatggggaccatatttacggcgttattaaaggaagcgcggtgaatcacggcggccgcgcggcatctttaacaacgcctaacccgaaacaacaggcggaagtcattaaagccgcatacaaaaaagcgggcattgatccgaaaacagtctcttatatcgaagcgcacggcaccggaacagaactgggagatcctgttgaaattaacggcctgaaacaagcgttcagctcgtttgcagacggaaaagagaaagcggccggctattgcggtttagggtcggttaaaacgaatatcggccatttatcccttgccgcaggagcagcgggcattattaaaattttgctgcagatgaagcatcggacattagtaaaaagtctccactgtgagacggtaaatccgtacattcagcttgaagacagcccgttttatctggtgcgggagacgatggaatggaagacgcggacggacgaacgcggaaacgaacagcctcgccgcgcgggcatcagctcattcggcatcggaggcgtaaatgcccacgtcgtcatcgaagaatacatcccagaagacagagaggaagcagatgattttcatatcgacccatgtcttttcgttctgtccgccaaaaatgaaaaacgcctgaaagagcaggcaaaacagctgaaacgtgcgcttactgaaaaacggtacgatcaatcctccctcgtttctatggcatataccctccaaatcggaagggacgccatggaagaacgtctggcggttattgccggatctgcagaagaactgcaggaaaaactgtcacagtttatcactggagataagcatgctgatttgtacagaggaagaatagacaaaggcacgctgcaaatgctgacggaagatgaagaaattcaagaagccgttgaaaaatggatggcacgcggcaaatacgcgaagctgcttgaattatgggtcaaagggctgaacgtcgattgggcgaagctgtatggagaccggccgcctaaacgcatgagcctgccgtcgtatccttttgcaaaagaccgctattgggcggcaaaaagcaccggaaaacacgaaaaaacaagcactgtatctgccggaaaacaagacgcgcttcatccgcttctgcacagaaatacttcaaaccttgcagaacagcggttcagttcaatctatacaggaaaagaattttaccttgcggaccatgttgtaaaaggcgtgccgattttaccgggagtggcacatcttgaaatggcgcgcgcagcaatggaacaggcatctgaagttccggccggacaaggaagcgtcaagcttaagaatacggtttgggtgcggccgatcaccattgaagacgagccggttcatgtcaacatccgtctcattcctgaaacggcaaatgacgttcaattcgacatttacagcggccgggaaacagatcagccgtccgtttacagccaaggggcagtatcagtccgccctgacgccgaggcaccggtcattgatctccaaaagctgagatcacaatccgccgagacaccgttttctgcagatgaagtgtacgatatgtaccgcaaaatcggttttgattacggcccggctttccggggtgtcaaagcgatttatacaggtgatgatttcgtattgggcagactgtcacttgatgcggcttgtgcggacacggtacaggagtatgtcatgcatccgggcttaatggactctgcattgcaggcatcaagcatattaaccggaacaaatgatgaaaaactgatgcttccgtttgcggttcaggagcttgaagtattcagcgcatgcgctgccgagatgtgggtttacgccagactttctgaagaccacaaagccggccagattgaaaaacgcgatcttgatatttgtgatgaaaacggcaaggtgtgcgtaaggctgaaaggtttgtcattcagaatggctgaaaaagaacctgagaaaaaagaaaaagctccgggaacgctcatgcttgagccggtatggacccgaagcgatgaaactgctactcaaacggaaccggtttttgcccggcatatcgtgttgctttgtgacacagacgccggattgaaacaagccgttgaagccgcgggagctgaatgtattgaaatgacctcccggcacgggaaagcggcggcgcgcttccgtgattatacaggacggatattggagacgctgcaaaaactgctgaaggaagagacggatggagacgtcctcatccagacggttctctctaaaacagataagcatcagctgctctcaggcatttcagctttgttaaaaacagccggcctggaacataaaaaactgaaaacccagctgattgaaatagaaccggcggaaaacggcagaatcacagacatcatcagagaaaataaaacacgggctgatgacagccatatcaaatatgaaaacggcatccggtacagcgcagatgtcaaagaaacggccgtgtccggcggcaaaatacgcattccgtggaacgacggaggcatttatctcattaccggaggagccgggggcttaggctttattttcgcgaaagaaatcgcccgcaaagtcaaagagccgacactggttttgacaggccgttccgcattaagcgagaatcagcggatgcagctgcaatcgcttgaatcactcggagcaaaagcggaatacaagcaggctgacgtaacaaacgctcaaactgcggcagacctggtcaaaacaattgagacggaatatggcggccttcacggcatcattcatagcgcgggtgtgatgaaagatcaatatatcgcaaagaaaacaaccgaagagttttacagtgtattggctcctaaaacggacggatttgtcaaccttgatgaagcaaccgagcatttagcgctggactttttcatcgttttctcatccatttccggcgtcaccgggaatgcgggacaggcggattatgcggcggcaaacgcatttatggacagctatgcggcataccgcaacgcactggttaccgcaatgtaccgccacggtcacacattgtcggtcaattggccgctttggaaaaacggcggaatgcaagtcaatgaagaaatggcgaagctcaccgaaaaaagaaccggcgtaacgccgatgcgcactgagaccggaatagaagctctttacaaagcatggagcatggggaaaacaagcgtgctcgtcatggaaggaaacggcgccgtaatgcgggaaaagctgcttcaaaagactcctgcagcagcttttgcaccggttaagaaaacagatgaaacgcctgcgccgaaagacctgacggcaaaacttcaggaattgctggcaaaagaggtttccgggcttctgaaaataaacattgaagaaatcgatatcgaattggagttcaatcaatacggatttgattccattacgctgacggaattcgccaacaagctgaatgacacttatcagcttgatctgacaccgaccgtattttttgaatatgcgacgattcaagccttggcgcatcatttagcagaagactatcaaacacaatttgccggcagcacacagccgaaagaagaaaaacaaagcagcgtaactgatgatggcggcatcagactggcagggaacaaacgatttgcaaaaactgccgtacagcctgttcagactgcggctgaacataaaccggaaccgatcgctattgtcggcatgagcggagtgtttccgaaggccgcaaatattgatgagtattggcgcaacttagaagaaggaaaagactgtataacagaggtgccggcgaatcgctgggactggcgtgagtattacggtgacccgcttaatgaagccaacaaaacaaatgtaaagtggggcggatttattgacggagttgcggattttgatccgctgttcttcggaatttcaccgctggaagccgaacagatggatccccagcagcgcttgttaatgatgtatgcgtggaaggcgatagaagatgcgggatattccgctaaaagcctttccggcacgaaaacaggcctgtatatcggcacggggaataccggatacggctcactgttttccgacctggatatcggcggtgcgtcagccgcgaatatgagtccgtcagcggggccgaaccgcgtcagctatatgcttaatctgcacgggccgagtgaaccgatcgacacggcttgttccagctcgctggtcgcgattcatcacgccgtatgcgccattgaaaacgggaactgcgatatggcgatcgccggcggcgtgaataccgtcgtcacaccgcaaggccacatcgcttatgacaaagccggcgctctgagcaaagaagggaaatgtaaaacattctccgacagggcggacggatttgccgtcagtgaaggtgccggaattctgtttttgaaaaagctgtcagaagcggaaaaagcgggcgatcatatctacggcgtcattaaaggcagcgcggtcaatcacggcggacgtgcgaactccttgacgacgccgaatccgaaagcccaggcggaagtcgtcagaacggcttatgacaaagcaggcattgatccgagaaccgtcacttatatagaagcgcacggaaccggaacggagcttggcgatccggtcgaaatcaacggcctgaaatccgcctttcaaaagctgtacgaaaaaacaggcgatcccgccgtttacgcgagtcactgcggtctgggatcggctaaaaccaatatcggccacctgtcactggcagcaggtgtcgcgggtgtgatcaaagtgctgatgcagatgaagcataaaacacttgcaaaaagcctccacagcgaggtcatcaacccgtatatcaagctgaaagacagtccgttttacatcgtacaggaaaaaagagaatggacggcattgaaagacgaaaacggcaatcttctgccgcgccgtgcgggaatcagttctttcggcatcggcggcgtaaacgcccatgtcgtcattgaagaatatatcccgaaggaagaaagaaaaacagctgttttcacacaccctcaaatctttgtgctgtcggccaaagaagaagaacgtctgcaggaacaggcgcagcagctggcgcaagcttcttttacggatgcggatcttgccgatgttgcttacacgcttcagcaggggcgtgatgccatggaagaaagagcggccattatcgcttcctcggctgaagaactgcgggacaagctaaagagctgtgcgaaaggacgttatgatatagcgggcatttataaaggaaaagcgggtaaaacctccctgaaatccattctggcaggcgcaaacggggaagcggatatcgaagagctgataagccgccgagagaatgacaagcttgcggaattatgggtgcagggcgcggatatcaaatgggacggcctatattctgatatcaagcctcaacggatgagtcttcctgcttacccgtttgcgaaagagcggtactggatcacggacaatcggccgaaagcagagaaaccgcaagctgtgccgacgtcgcaggtgctgcacccgctgcttcacgaaaatgtatcagatttaacagagcagcggtaccgatccgaatttacgggacaagagacgattttcaccgatcatcttattaaaggcaagccggttatgccgggcgttgcctacttggaaatggctagggcggcggttgctcaggcagtcaaagggcaaaaggaacgtccttctgtcacccgcctgaaaaacatcgtttgggttcggccgatcgaagcgggaaaccgcccgattgaagcggaaatcagcctgaacccgagggaaaacggtgaaatcgtgtatgacgtttacacggattcacaaacagaagcaagcggcaggcagatacactgtcagggggctgccggcattctcagcgccggggaggctccgcaccgtgatataggcgcactgaaagctcaattcggcctcagtatactgacttctgaacagtgttacggcttattcagcaaaatcggcattgactacggtcccggacaacaaggaattcagcagattcatatcggaagcaatcaagcgttagctgagctccggctgccttccttcctcgaagaaacggcagatcaatacgttcttcacccgtgtatgcttgattcagctttgcaagcgacaatcggactgaagctgcacgcagatgataaccagctgtcactgccgttcgcccttgaagaactggacattttcagcccgtgcacgacaagcatgtgggcgtatgtcagctcccggggaacggatgaaaaaatacagcgtatggacattgacttatgtgatgagacaggccgggtctgtgtcagaattaaagggatttcttccagaatgatggaaggcccggcgccggaaacatcattaaatggagcaaaccttctggctccggtgtgggatctcgcggaattccgtgatcaaagcccggcatataagacggaagaggttgtctttatcgcgggggatgaggaaagcgcggcttttcaattgcatcatccttctgcgaaacggcttcatatcaaccaggaggatgaaatagaggctgttgcggctgaactgaaagcaacagggtctttcgggcatatcgtatggatcgctccttttcacagcgctgatgacatggtaaaagctcaggatgcgggcgtcattcagatgtacagagtgattaaggccatgcttgctttaggatatggaggcaagcgaatcagcttgactgcagtcacaataaaaacacagtccgtacagccggcggacattattgatccggctcatgcaggcattcacggtttggtcggctcgctcgcaaaagagtatccgaactggcaaacaaggctgattgatgccggatgtccggaagatgtttcaaaggcggagctgttctcagcgccgtttgatgagcaaggcaatacatgggcgtaccggaacaatcactggtacaaacagcgccttattcctgtacagcagccggtgtcaagccggcccgcctaccaaaaaggcggcgtttatgtcgtcatcggcggcgcggggggcatcggcgaggcatggagcgaatatgccgtgaaaacgtatcaggcgcgagtcgtttggatcggcagacgaaaacataacagcgccatccaggaaaaaatcgacagactcagccaattcggcccggctccgatttatattgaagctgacgcggcaaatccgaatgagctcacacgggcgtatgaaacgatcaaacgcacgcacccgcaaattaacggaatcatccattccgcaattgttttagaggatcagagcctggcaaatatgccggaaagccgtttgaaaagcgtgctcgctgcgaaagtcaatgtcagcgtgaatatggcccgcgtgttccgaaatgagccgctggactttgctttgttcttctcatctgttcaatcatttgcacgagcggccggacaaagcaattatgctgccggatgcagtttcaaagatgcctttgccgctcatttggctcaagttcggccgtattcggcggcagtgatgaattggagctactggggcagtgtcggaatcgtatcatctgccgactatcaagaacggatgaaacaggcgggagtcggatcaattgaagcgccggaagcaatggcggcgcttgaacgattgctcggcggcccgttgaatcagttcgtcatgatgaaacaggcggaagagccggaggaaaaaccggaagaaatgatagaagtataccctgaacatcacggctcggcgatgcaaaaactgcgaagctatcagcctaaagtaacaagacatgtacaacaattgagttaaggaggggacggctttgcaaaacactgaagatcttctttacaaactattggcaggccagctgaaatctgtcggattttttacggaaaacgaaacgcagcctgtcatgcaggggttttacggcaggtggctggaagaaagcatctccatcttggtgcaaaaaggctttttgaaacagtcaggcagtacgtatgtgttaacgggtccgatagagcgtgcggacgttctgtggcaagaatgggatgaaaagaaagctcctttactcaaggacagcagcaaacaggcgatgatcaccttagtggagaccgctctcagagctttgccggatattttatccggcagagtttctgccactgatgtcctgtttcctgattcctcaatggaattggtggaaggaatctataaaaacaatgaaacggcagactactttaatgaggtgctcgctgacacattgacggctttcattgaagaacgcctgaaagaagacccgaacgcggaaatccggatattagagatcggagcggggacgggcgggacgagcgcggccgttttcaaaagattaaaagagtacaaacatcatgtgaaagaatattgctacaccgatctgtcaaaggcctttttcatgcatgctgaaaaagaatacggtcccgacaatccgtatttgacttataagcggtttaatgtggaagagcccccggctttgcagggtatagaggcgggcgcatatgacgcggtaattgcggcaaatgtgcttcacgcgacaaaaaatattcggcggacacttcgcaatgccaaagcggtgcttaagaagaatgggattttgctattaaatgagatcagcagccattcggtttattctcatctgacattcggccttttggaaggctggtggctgtatgaagacgccaaactgcgcattcccggatgcccggggctgtatcctgaagcgtggcagtctgcgctggaaagcgagggatatcggtacgttacatttatggcggaatcgtcacatcacctcggccagcagatcgtggcggcagaaagcgacggtgtcatcaggcaaaagcagccggacgcgcaggcggttgaagaaactgcggcttccaaagagccggctgatttcacagaaccgtctttctcagtcacagaccggactgtgcaattcataaaagaaacgttagccaagtccataaagcttgctcccgagcgcattcagccggaaaccagctttgaaaaatacggcatcgactccattttgcaggtgaattttatccgcgaactggaaacattgacgggcgagctgccgaaaacgatcttatttgaacacacgaatacgaaagaacttgccgggtatttgctggaaacttacccggataagctgcaacaggcattcggagccgaacaagcgcctcctgaaacaaagcatccggaacctgcaatgaatgaaccggtgccgcttgtcacggaaacgcggcgatttatcaatgaacaaaaagagccaaaagcgccaaagccggaaacagaaaccgtcaccgttaatcgttctgatcgtgacgacattgccattatcggcatcagcggccgctatcccgagtctgaaaccctcgatgagctgtgggagcatttaaaagccggagacagctgtattacggaagctccggaaaacagatggaaatccggtcttctgaaaacaatggcaaaagaaacacgaaaagaagaacgcaaaacacggtacggcggatttctgcagcatattgacgattttgaccatcacttgtttgacatccgggaagaccatgtgatggagatgacgcctgagctccgtctaagcttagaaaccgtatgggaaacatttgaaaatggcggttactcgttagaaagagtaaacgaatggcaggaatcagacagcggcatcggtgtatttatgggcagtatgtacaatcaatatttctggaatatcccgtcattggaaaaagctgcgctcagctctaacggaggggattggcatatcgccaaccgcatttcccactttttcaatttaacgggcccgagcatgggcgttacgaccgcatgctccagctcactgagcgccattcatctcgcctgtgaaagtctgaagcttaacagctgttccatggcgattgccggaggggtcaatctcacgcttgaaccgtctaaatatgatgcgctcgaacgggcgaatttgcttgaacagggaagtgaaagcaaaagcttcggaaccggcacgggcctgatgccgggagaaggagtcggggcggtgctcttgaagccgctctccaaagcgcttgccgacaaagaccatatttacggggtcattaaaagcagcgcgttgtgccatagcggcggaaggcagatgtacacggctccggatccgaaacagcagacgaagctcatggcggcttccatcgaaaaggccggaatcaatccggaaacaatcagttatgttgaatcagcggcaaacggctctgtattgggagacccgattgaggtcattgccctgacaaatgcgttcgcgcaatatactgataaaaaacgtttttgcgcgcttggatccgtcaagtcaaatctcggtcatttagaggcggcttccggcatgtcccagctcgcgaaagtgctgctgcaaatggagcgggaaacattagtcccgacgattaatgcaaaaccgcaaaatccgaatatcaaccttgaacaaacggcttttcacctgcaggaaaaaaccgagtattgggagcgtatgagggatgccgaaacgggggacatcatcccgcggagaagcatgattaattccttcggggcaggcggagcatatgcaaatctcatcgtagaagaatatatcagcccgaattccgatcaggcccgtcacggcgatgaggaatatattttccctgtgtcagcgaaaacaaaatggagttttgaagcctatcttgacagactggcggcctttttagaaaagacgccatctcttcatccggccgccatcgcatccgcgctgcaaaaaagaacgcatcattcggagtatcgggcggcatttacggctgcttccgttcaggaactgctggaaaagctggccgcttaccgcatggatcagcggaatctcaatttctctgaatctgatattggccggcgtgcgcggcaatgggaaaaaggagagaatatcgcgtttgatcagttgcagcaagagcacgccgttcatctgccggcctacgcttttgaccacgggacttcttttcaattcggtgaatcagaaaacgctgccggcgttcaggcggtatacagtgatgacgacccatacgtgaaagggcatcaattcagcggagaaacggtactcgtcggcgctacatataacagtctggcagtcgatcatttttgtgatctttttcctgaagcggaaggaggacaaattaaaaaactgaattacgtcagccccattaccgtaaaaaaaggatatcgcatcgagctgaaaacagaatcgaaacaaaacggggatggatttgaactgagcataatgcaccgcagccgcacgtctcctgattggagcatagcggcgtatgccgagtgcagcccctatccgtttcaaaagcagcacgcggatctggcggccattcagcaatcttaccgggaagtgggccggatagatgagttatacggagacggaacgggaaccgtcgtgtggggagaagaatttaaaacgatcacccgcctgtacaaaggctctgatgccgttttagcgaaagtgaacctgaacaatagcgactcacaacaagcgcatcattatgccgtaaatccgttaatcgccaacagtgcttacttggcctcactttctttattggatcaaacggaggcggaaagctatctgccgttcggcattaattccgtcaccttcagcagccctgaagatcttaccgattgctggctgcacatcaagctgaccaaacaaacgggggaaatgattctgattaacgcagatgtcatcagcagccgatcggaagtggtgatgcgttttgaaggctatgccctgaaacggttccgcccgaaaaccgaacagatgaatcagccggcccgaacggctgttaagaatacgggggcaccgatttctgccggcagtctgacagatgatatccgcagctacgtccttggcaagctcgccaagatgatgggtgaacccgggccatctcttcgttctgacgcgaatatcatggaattgggacttgattcagcgagcctgatcgggctgacaaaagagatcggccaagaggcggacatcgatgtgaatccaacattgtttttcgagtatccgaccgcggaggagctgacccgccacttcgcgtcagcatatgagagcaagttttctcaatttcttgccgatcataagcattcagaagaggccagggtcacggaaacagaagagcgcactttaccgaagaaacagcatacgccttgtgataacgccgatatcaagcaaggaatcgcgattatcggtatgtcagctcagtttccgcaatccccggatatccagtctttttgggagcacatcgtaaacggggatcactgtattaccgaaattccggcggaccgctgggactggcgccgttacgccgatgatgagaatgacacgagtctcagatggggcggttttattgacggtgtcggcgaatttgacccgctctttttcggaatttcccctaaagaggcatcacaaatggggccggagcaatttctgcttttgatgcatacatggaaggcaatggaggatgcgggcctgacaaataaggcgttatcaagcagaccgacaggcgttttcgttgccgcgggcaacagcgatccgaacaatggaacagccatcccgtccatcattccgaacagaatatcatatgccttgaatttacaaggaccgagtgaatattacgaggctgcctgcacgtcaacgctggtggcattgcacagggcggttcaatcaatccgtcataacgaatgtgagcaggctgtcgtgggcgccgccaatattctgcagtcgccgaagggttttatcggttttgattcaatggggtatttaagcaaaaacggccgggcgaaatcgttccaaaaagatgccgatggctttgtcagaagcgaaggggcgggcgttatcatcatcaaaccgcttgaggcggcaattgaagacggcgatcatattcacatggtcattaaaggaacaggattgtctcacggcggtaaaggcatgtcgcttcacgcaccgaatccggcgggaatgaaggccgcgatgaaaaaagcgtacgaagacaccgatgttgatccgcaaaccgtcacttatattgaagcgcacggcattgcctccgaaatggcagatgcgctggagtttaatgcaatcaaagcgggttacggcgagtctgcaaatcaagaggaaagcgcgccttgttatatcagcaccgtgaaaccttgcatcgggcacggcgaactcgcttccggactggccgcccttataaaagtggcgatggccatgaagcatcataccatcccgggcattcccggatttacagctgcaaatgagcaaatggccattcagaaaagccgcttccgtttcaccgaagacaatcaggaatggacacagctcaccgaccatacgggcagaccgatcccgcgccgggccgcaattaacagctatggcttcggcggcatgaatgcgcatgtcgtcttggaacagtacagcccgagccataaagacaaagaatctgtgcatgaaccgcagcttatcgtgctttctgctaagagcgaagggcgtcttaaggcggccgcaagtcagctggctgattttgtgcaaactggagatactccgtcattgcgggatattgcttatacgcttcagaccggccgtgaggcgatgaactgccgcctggcactcgttgcccgcaatcaagatgaattgctggaaaaactgaaagagtacagagcattttccgaagaaagcaatggaatgaaaagcttctttacaggcagtcagcagactggatcaggagatatcggcattttactggaagggactctcggtacagtcgtcacggagacgctgttggctgaaaacaatctcgaaaaacttgcattttgctgggtgaaaggtgcggatataccgtgggacagactccaccaaggcaaatctgttcaaagagtgccgcttccgacatatccttttgaaaaccataagtattggaaaggcggtcagccagaagacatcagccttgcaccggtttcacaggaccctcagctctgccgcgagagcgcagctgacattgtggctgacattctggggatgaaggcagcggaaattgatcaaaataagccgctgactgaatacggcttcgattcaatctcctctattcagctgttgaaaaaatttgaggacggagacagccgcatcagtctggaggctcttcagaaatgcagcactcttcaggagatcggcatgctgttaaaaacggaccaaccacaggagacgggccggaattttcccgaactcgtcaagctgaatgaaagagaaaaaggccgtcctgttttttggtttcacggcggaacaggaggcgtggaagcataccagccattcgccaaaaagagtcagcgacctttttacggcatccaggcaagaggtttgacagggaaagagccgctgcaaggaatcgaagagacggccgcttcttataagagaatcatccaagcggtacagccgaaaggcccttatgatctcggcggatattccttgggcggaatgcttgcatatgaaaccgcgcgcctcttgcaggaggaaggtcatacggtaaaaagcgccgtcatgatcgacactccgtacagtgaaaaatggaaagaaagaaaaccatctgttaagtcagtcatgctgcaaacgatcaatacgatgcttacagcatatcttaagcctgaaaaccttgaagaggcattaatcagcagagaagacattaccgcccaggctgaggaagaagaagtattgaaagaattgatcggccttgccaaaaagcgcggtctgccaaaatccgaagaagcgatccggatgcagctggagcaaatgatgaagacgcagctcgcttacggaatggaagagtatgacatgaagccgctgcctcatccggaagcgctgcaatgctattacttccgtaataaaagcggtttgttcctcggagatcttgaacgttatctgacggcagaggaagaacaaattccgttagaccatgatgcgtattggaaagaatgggaacaccagatgaaacagtttcacctgctggacgttcactcttccaatcatgtcacaatgctgtcggaaccgaagccgcaaaacgccattaaggcattctgcgaaaaactgtacgcaaacaaaggaacgataagcgcaaatttccttaaatctttcagaaaaaagctggacgaaacaaatgagttggtaaaacggtaatagagaacggccggagcaatccggccgctttttttatctatatagaactaaatttactatgtactaaattttcattgttgtattgatttctgtttataagacattaaaaaaacccccgataaacagggggcgctattaaaatctgacaggcaatgtttcaagccctctcaaaaacacattttttctccatgttacatcctcggccgcgcctttcagctctatattcggaaaccgttttaaaagcgcagtaaaggcaatggatgcttccatccgggcgagcggagccccgagacaaaaatgaatgccgaatccaaaagagatatgacggttcggtgttctcgctgtatttaatgtatcaggatcatcaaaatattccgggtcccgattggctgaaccgatgccgataaatatcatatcgccttttttaatagaaacatctttaaaagtgaaatcttcaatcgcccatcgatttgccatcatgatgacgggagaggtataacgcaaaagctcttcgaccgccgtctggatattttccggctgccgctttatcttctccatctggtctttatgcagaagaagcgccagggtgccggagccgagaaggttaaccgttgtttcaagcccggcaacgactaacaaaaacagcatggaatacagctctgattcactcagcttttggccgtcctcttcagcgtaaataagcttgctcgtcaagtcttcacccggatgttttcttttttcttcgatcagtgttttcatatattgtttaaattctttgagagcctggttggtcgcatcttgtccgctttctgacgtgtcgaccattgcgtttgtccacacttgaaatttggcgcggtcctctttcggaattccgagcagctcggaaatgacgataaacggaagcggtgcggcgaaatctctcatgatatcagggtctgcttttgtttccatttcatccagcagctcttctgtgatctgctctatcccggtgcgaagctgctcaatcatccggggagtaaacccctgatgcaccaaagatcgaagtcgtgaatgatccggggggtcttttgccagcatatgctctgagacaaaatcgatatcttcactgacattcagcttcgcgatcagctccttcggcatgactcgttttacatctctcgtaattctgccgtctttcaaaaacgccatacaatcatcataacgcgtgatgagccaagccggaaaggtgcctccaaaacgctgcagttcgaatttatgtatggggtcctgctctctgaatctgcttaaaaccgcaaaagggttttcgtgaaactcgggtgagtgtgggtgaaacattgttttttccatctggatttccccgccttcatgtttttgaaacgacataacaaacagccggtgcctgccgaccggacggcattcctccttttatctgccgaagacactgatcacaacggctcataagtatgtctaaaatatataaggaaacagtagccggttcaatagacaaatcgtaaagccgccattttcgttgattatcaacaaaacagcaaactttttttgccatttcatcatgtgtgttaaatccggctaatatacatatttacgcttcatatcaacttctaaggaggatgtgaatgaatgcgtttatgaaatgggcggcaagtctgcttttggtgatctctcttcagttcggctttacgggcgccggcatccattcggacagtgctgctcgtgccgcatcccgatacgatcaggtgctgtatttcccgctgtcaaaatatccggagacgggaaatcatataaaagacgccatttcggcaggtcattctgagatttgtacaattgatcggggcggagcggaaaatagaaggaaagaatcattgaaaggaattccgacaaagcccgggtttgaccgtgatgaatggcccatggcagtctgcacagaaggcggggcgggggctgatatcagatatgtaaccccgtcggataaccgcggggccggttcatgggttggaaatcaaatgagcggatattccgacggcacgagagtattatttatcgttcagtagcttctccggttcgccggagtttttttatgctctgaaaaagcggcacgccggctggacatatgaaatggcaaagagtaaacttattatttggaatcagcatgagaaaggattggatcacattgacagtgactacataccgaaatattgcacttttacttctttgtttaacagcgggaattgtggatgtgatcggttatttaagcctgggacatatctttaccgccaatatgacggggaacatcgttctgttcggcctggcggtcggcaactcatggcaccttgccgtactcaaatcgttaacctcgttaatcggatttattgcgggcgttattgccgcggccctgcttgtaggcaataaaaagaaatcattctggccccctgcggtaactgccgctttagctattgaaggagctgttttgctgctgtttgctttgttctcctgcttttttgcagatgccatttctgtttatgtgctgattatgctgctcagcttcgcaatgggaatgcagacgacagccgcgagaaaacttggtgtagcggggatttccacgaccgtattaacgggaacgctcgctaatttttttgaagatctcaccgcaaggttttacaaagcggacaagcggaagcagtttacgagagatgctgtattgcgcgcgcttgccttggtgctgtattgctttggggcggttataggcgcttttgccgaaccggattataagtttgccgtgatctggctcccgattatcattattttaggcattatgctttgcgcattcacgatgttccacggatattcagaagaaaaaaaccaataaaaaaacgccgctgattcagggcgttttttctttttattgctctttccgggtcccgattgtataaacggcccgatctgtatgtacctttaatccgtcttgctccttttggatggtgatgtcaccgagcagagggatttcatacgcatcttggggaagcgggacatttccttcctccgtataggttgtgccgtgcccttttaagacgagttcttcgtccgctacatagtcatcgggatggtttgtccggcggacgagaacatcatcaaggtgaagcatgatctggtccatatcagaaatctcgtttcggctgtctgtcagctctccttttctgatatcaagcgtttgtccgatctgtttttgcagccattcagacaattctgtgtttgtaagtgccattgtgattcctccttttatctacaccatacttattccctatttttttagaaatacactgccttgcattgatctttttttctgacagccgatttgtgaagcgttccgagtttcttcattataaatgtttcatctgttcacctgaaaaacggagtcatctgcaggtgcagacgactccgttctcatgataaaaaggttactctttcggcacggcgttttcagcgtttactgcgcccgctccgtaaatgttcggatcttcatttgtccatttatccggactttgtttgatcagtgttttcacttcgtcaggcgaaagctgcgggttctgctgaaggattaaggcggcaatgcccgcacagatcggagtggccatggacgtgcccgacagactgaaatacaaggagcctacacggtttgatttctgtaatttatcaaggtatgaacgcggagaacggagagatacgatatcgaccccgggcgcaagaatgtcaggcttctcttttccgtacaccgtcgggccgcggcttgagaaagaagcgaccgtatcgtcctcattgccggccgtatcattgtcatcataggcgcctaccgtgatgaccttctcgctgacaccggggcttgaaatcgtttgagcttccggaccggagttgcccgcggcgacgcagacgacgattccttcattccatgcctcttcaacggccttgacgagcgggtcgtccgtttctttatcatatctgagcgcatctccgcccagtgacatgctgatgattctgatcggattctttgtgtgttctttattatattgtatgcaccattccacaccttcaatgatatcagccaaggttcctgatcctgatttgtttaataccttgactccgatcagatcggcttccggcgccggcccctgatatttaccggaagatgaagcgccgctgcttgcgatatcaccggcgcaatgggtgccgtgtccgttgtcatcatacggttctgtcttttggttgacaaagtccgcaaatccgataactctgccttctaaatcgggatgctgatagattccggtatcaataacggcgacggttacgccttttcctgttaatacggtgccgttacgggtcacttcttttgcatgagacgattcagctgccgtatcaaggagcgcttttacttcacggtttaaatagattttacggatatcccggcattgcgaaagaagcatgtgaagggcggacggagtgacttcggcgctgcagcaattgattgtttgaaactgcttttttatggtgcagcgtttttcttttgataagacctgtcctgtgctgtgaaaaccggattcatggcagccctcttcaaattcaatgatgactgacattttctttctgtttttcacctttttttcgaaaaacttgtgcaaaaagcaaggtgtccatttgaaaggtttatataactgtaatacgttttctctgagcggccagtccagcttatgagcatttgaccgcaccatttgtaccattgagtaaccaaacatatatacttttcctcccattctggcgattctctctataccatatgaacaggccgtatgttcggtcagtttgtttgtccttcaggagcgctggttacttgcggctttttcaggagaagaaatcgagttgaaacagaatgtttgttcgtttataatgaagccggcggaaggaggtatatacatgaacataatattgagacattccttggaaaaacagcttccgattgatattatatatatgaaaaaagacggttccatttcaaaacggaccattatgataaaaaaaggggatgagcgggctgtaacggcattttgctgtacaaaaaggcagatgagaacttttttgacgggctccattctgtcctgcgcatttgcttcgggaggcggatattcatttttaaaagcgtattcttgatgccgtccgtttccggccgtgaatctcccgcccctgaaaattcgggcgttcctccctttttttttgccctctctcaaccttttttcactgatgcccggcatttgagcgcttgaaccgtgacaatccattgatttttcgaaaccgggaagtttttcactgatgataatgttaatagaatgttaagataagacctattgacaaaaatccatataatgaacatgtcatttttcagaaaggagcaaagaaggagagctgatgaaaagaattttacttaatgtcatcattatcgtagcaatggtcttactaataagatgtgctcattatgcgtcagaccctgatccctcgaattcttctgatacatacacagattttaaagatttggctgaacatgaagaccccgatgattatcatatatcgtacaataagcgaaaggggagccccgtattgatcatgtcgccgcacggagggagaattgagggcggggtgagcgagatcgtccgctctttcagagatgattactcaacctatctgtttgagggattaaaaacgcatgataaccagactcttcatattacgagcaccaggttcgatgagccttcagcagtcgaaagcattaagcagcaccattatgttatcgcagttcacggttataaaggcgacgagaaaaatactcttgtcggaggaagcgaccggaagcgggcgaaaaaattggtgagagctctcgaacgaaacggattttctgcagaattggcaaccacaaaaaccggtctggccggggttgacaccgaaaatatcaataaccaggcgcaaaccgggctgagcatacagcttgagatcagcagagaacagcgggaagcgttttttgataattttgattaccgcgaaagggaattcacaaaaacggaggaattttaccggtttgtccgtacgataaaaagagtgatcaatcaagagtattcgtaagcttaaaaaaagacaaacgagtgaaagatgagtaaactgaaaaaaaggaggtttgtcccttggcaaaacatcacttttatttaaaagcaaattggcccggaaatcgcaatgacgtcggcgatattaaaagcggccggctggaaacggctgtgtccattcctaaggaaatggacggacccggagaaggcacaaatcctgatgaaatgctgcttggagcggccgctacctgttatattataacgcttgcggcgatgatggaaagaagcggcctggataaagaagatctgcatatggaatctgaaggaattgtagacgtcacgaacggtgtgttcacgtaccagaaaatcattcaccgtccgtttatattattaaagccggatgcagccgaaacggactttacgctcgccaggaagttagcgcataaagcagagtcctcatgtatgatttcacgagcggttcaaggaaacgtggagatggagcttgaggttgaagtaaaagctgcccgcgcttgacgagttcaaacggtcagctccgggccgtttgattttttttagctttttgagacttggaacggttcagcaggatgacgcccgtgatgaccaaaacaagcccgatcatcattttgactgtcatggcctccttaaaaacaaaaaagccgacaattgccgttaaagcggtgccgacacctgaccatgtcgcgtatgcggcggataaatcaaggcttttcaatgagaagctcaaaaacataaaagaggctccgattccggcaatgacgccgagagcgggccacaggtgcgtaaaaccgtccgacagcttcagcatcgtgctcccgaacacttctgatacaatggctaatgccaagcaaagtaatcctttcatcagcatgcctctcctttctaccaattcatcaaaatgacaccggccaataagaaaaagagtccgatgacggcctgcttgtccagtttttcatgaaaccatttcgctccgataatggatgcgagcaccgttccggctccgctccatgttgcataggataagctgagcggaatgagattcagtgtcagtgaaagcatataaaaggccaatgaatagcctgccactacaagcgcgctcggcaaaaaccgcgtaaatccgcgggagaccttcagcatggccgcgccgattgactctgataaaatagcaattgtgaggaagatataacccagaatcatatcaaatccccctctcatcataatccttatgccttttgtttaaggcagtaaaataaaataatatccgaactttgcccgccaagtcaagacattaggcctatacaaaaaggcccccggggaggagcctttttgattcgtcaatagtaatacggataacctccgtacggatagccgtagccgtaacctccgtacaaatacggattgaacaaagcgcttccgacaagccccccgacaagccctccgacaaacggtccgccgtaaaaaccaaacggccgtccgaacccgccaaaccaagggcggccaaaccaaggccggccaaaaccaaaacccggccgtccgaagccgaatccgaatccgggacgcccgaatccgaatcccggccgtccgaacccaaatccgggccgtccaaactgtctcatatcactatctgcttcgtatgtgtattcttcattcataatttaggtacctccaagaataaatttgagatgataacagagtattcagcccaccaatttttgattgggcgtttatcaaaaaaataaaggagtgagcttttgtgggcctgtatcagtccgattggtcaaaaaaacctccgcacacacacgcataccgggcggttacggatgtagtgcaggggcattaccatttgattgaaggcttttcgcagccggagaacggcagcaatacagataagcatacacatttctatacgggcatcacctcgtttgaaaacggccattttcataggtattacggcatttccggccctgccatcccgagggttgacggaacacattaccatgagctttcagagaccacctttgccgcctacaatgagccgattcagatccagcacggcggcgtcgtttacgatccgcgggaggaaggacggaaaacgcaccgccatacgctcaaaggaaaaacgagagaggttgtcggaaacgagccgatcgggtggtagcggacgtttagcgctcaggaaaaagggcaaaatggataggtgcctgaagaaatgaatgctataattagggggagatttataaaagagagtgatacatattgaaaaataaaaaacagcctgtcgtcatactcgtcggaccgacggcagtcggaaaaacaaaactaagcatcggactcgcgaaaatgctgaatgcggaaatcatcagcggagattccatgcaggtatataaagggatggacatcggaacggccaaagtcaccgaagaagagacagaaggcgtgccgcatcacctgattgatattttggagccgtccgacactttttcaacggcggattatcagaaaatggtaaggggaaaaatcaccgagattgccgatagaggaaagctgccgatgattgtcggagggacgggtctgtacattcagtccgtgctgtatgactatacgttcacggaaaactccggcgaccctgtattccgggagcgcatggagaaactggcggctgaagaaggggcggaagcgcttcatgccaagcttgcggcagccgacccggaagcggcggcagccattcatcaaaacaatacgcgaagagtcatccgcgcgctcgaaatcttgcatgtatcgggaaaaacaatgtcagagcatcttaaaacccaaaaacgggagctgctttacaatgctgttcttatcggtcttacaatggacagagaagtgctgtacgcccggattaacgagcgcgttgacctgatgctggaaaccggccttcttgacgaagtaaagcggctgtatgatatgaatatacgggacagccaatcgattcaggcgatcggctataaagagctgtatgaatatcttgatggaaaagtgccgctccctcaggctgtggaacaattaaaacaaaattctaggcgatatgcgaaacgccagctgacctggtttcgcaataaaatgcccgtttcatggacagatatgaccccgcctgttgatattgagcagaaaaaaaaggaaattttcaagtgcatagcaggaaaactggaaatttaatcgaaacagtattgtattgagaaccaaggaggacgaaacatgaaaccgattaatattcaagatcagtttttgaatcaaatccgaaaagacaatacgttcgtcacggtgtttttactcaacggcttccagcttcgcggccaggtaaaaggctttgacaactttaccgttttgctcgaaacggaggggaagcagcagcttatttataaacatgccatctccacgttcgccccgcaaaaaaacgtccagcttgagcttgaatagactttttgaaaaaagaccatgaacaatggtctttttctatgcgcatctgtatattgcaggctgtatatcggaaacataaaagggggttcggaaaatcgtgttcgaaagtgaaaatgaactgagaagaatcagaattacgctcgtttggatcgctgtttttttgctgtttggagcttgcagcaatcatgagacggtggtgacggatgatgacggcggttcaacggataccgaaccgcagacagaaggcatggtgcagctggaacataatcgtttcggcatcgttgaggacggttacttaaaaatataccgctatgatgaaaaaacgaatagaatcgaactgaaaaaagaaacggcgctggatgagcttgaataaatttcacaagcgttcgaatttacaaagcgggccgcacaagctacactaagtactgacattgatcatgcagagggtgagacgattgaaacacaaggtgataatcaaccattgggaagaaacttgtgaagatgattcctgctatgaatatggaaccagcatcatcgttgacggcaaagaactgatcagagaggcttccatcacaagcgctctgaaagccgtactgaaagaaatcggtgctgatgtggagattgaagaaaccgttgaaagcgaaaaaaaatgtgattcttacaaaaaataagaataaaagtctagactactaagcagttttttttcatgttatgatagacatcggcttacacatgacaccttgagtaggatgagagatgattctcgttctgctctcttttttgggcgttaatcgggccagagccaaagtccgctctttcaaaaatatgaattttttataaatcgttctcaatatgttgtgtttttctgagaggttagtatactatatatagtgttaagagattcattatttttgataggtcgtgataaggatggttcaaatcatatttgattcaaagacagggaatgttcagcgttttgtgaataaaacagactttcagctgatccgcaaggtggacgaaacggaccacgtggacactccgtttgttttggtcacctacacgacaaacttcggtcaggtaccggcatcaacacaatcatttctcgaaaaatacgcccatctcttattaggagtcgctgcgagcggcaacaaagtatggggcgataactttgcaaaaagcgccgataccatttcaagacaatatcaggtgccgatcttgcacaaatttgaactcagcggcacatctaaagacgttgaattgtttactcaggaggtagaaagagttgtcacaaaatcaagtgccaaaatggatccagttaaataacgaaatcatgatccaacaggatggaaaattccagtttgataaagataaagaggctgtacatagctattttgttgactatatcaatcaaaacacagtttactttcacgatttaaaagagaagctggattatttgattgaaaaccaatactacgaagaggaattcttaagcctttactcttttgaagacattaaagaagtgtttaagacagcttacgcaaagaagtttcgttttccttccttcatgagtgcgtttaaattttataatgactatgctttgaaaacgaatgacaagaaaagaatcctcgagcgttatgaggaccgaatctcaatcgtcgcgctgttcttcgcaaacggcgacactgagaaagcaaaagaatatgtaaacctgatgatcaaccaggaatatcagccgagtacaccgacatttttgaatgccggcagaaaacgccgcggagaactggtgagctgcttcttgctcgaagtcaatgattccttaaacgatatttcacgggcgatcgatatttccatgcagctgtctaaattaggcggcggggtttctcttaatctgtccaagcttcgcgcgaaaggcgaagcgattaaagatgttgaaaacgccacaaaaggtgttgtaggcgtcatgaagcttcttgataatgcgttccgttacgctgaccaaatgggccaaagacaaggctcaggtgcggcgtatttaaatattttccaccgcgatatcaatgattttcttgatacgaaaaagatttctgcggatgaagatgtgcgcgtcaaaacgctttctatcggtgtcgtcattccggataagttcgttgagcttgcacgtgaggataaagcggcttatgtattctatccgcatacgatttataaagaatacggccagcatatggacgaaatggacatgacggcgatgtatgaggagcttgttgacaacccgcgtgtcaaaaaagaaaaagtgaatgcgcgcaaattgcttgaaaagcttgccgttctccgttctgagtcaggttatccgtacattatgttccaggacaacgtaaacaaagagcacgcgaataaccacgtatcaaaagtgaaattctcgaacctttgctctgaagtgcttcaggcgtcacaggtttcggcttacacagattatgatgaagaagacgaaatcggcttggacatttcctgcaaccttggttcattaaatattttgaatgtcatgaaacataaatcgattgagcgcacggtgaaactcgcgacggattccctgactcatgtatctgagacgacggacatccgcaacgcgccggcagtcagacgcgcgaacaaagcgatgaagtccatcggtttaggcgccatgaaccttcacggctacctggcccaaaacggcatcgcgtatgaaagcccggaagcaagagatttcgcgaatacgttctttatgatggtgaacttttattccattcagcgttcagctgagcttgcgaaagaaaaaggcgaaacgtttgagcattatgaaggctccacttatgcaacgggagaatatttcaataaatacatcgaaaaagagttctcaccggcatatgaaaaaatcgctgcgctctttgaaggcatgcacattccgacaatcgaagactggaaagagctgaaggcgtttgtcgccgaaaacggcatgtaccacagctacagactgtgcatcgcgccgacaggttccatttcctacgtccaatccagcacggcgtccgttatgccgatcatggaacggatcgaagaaagaacatacggaaattcaaaaacgtattacccgatgccggggttagcgtctaataactggttcttctacaaagaagcttatgatatggacatgttcaaagtggtggatatgatcgcgacaatccagcagcatatcgatcagggaatcagctttaccctgtttttgaaagatacgatgacaactcgtgatctgaaccgtattgatctgtatgcccaccatagaggcatcaaaaccatttactatgcaagaacgaaagataccgggcaggacagctgtctttcttgtgtcgtttgattaaaggagagtttacagtgacaaaaatttatgacgcagcaaactggtcaaagcatgaagatgatttcacccaaatgttttacaaccaaaacgtaaagcagttttggcttccggaagagatcgcattaaacggcgatctcctcacttggaagtatttgggtaaaaatgagcaggatacgtacatgaaggtgctcgccggcctgacactgcttgatacagagcaggggaacacgggcatgccgattgtggccgagcacgtcgaaggccatcagcgaaaagcggttcttaatttcatggcgatgatggaaaacgcggtgcacgcaaaatcatattcaaatatttttatgacgcttgctccgactgaaacgatcaacgaagtatttgaatgggtaaagcagaataaatatttgcagaaaaaagcgcaaatgattgtcgggctttacaaagccattcaaaaagatgatgaaatttcactgttcaaagcgatggttgcttccgtctatctggaaagcttccttttctacagcggtttctattatccgttatatttctatggacaaggaaaactgatgcaaagcggtgagatcattaacctgatccttcgtgacgaagcgattcacggcgtgtatgtcggtctccttgctcaggaaatttataataaacagacagaagagaaaaaagcagagcttcgtgaatttgcgattgaccttctgaatcagttatatgaaaatgagcttgaatatacagaggacttgtacgatcaagtcggactctcacacgatgtaaagaaattcatccgctataacgccaataaagctttgatgaacttagggttcgatccttactttgaagaagaggatattaatccgatcgtattaaacggattaaacaccaaaacaaaatcacatgatttcttctccatgaaagggaacggctacaaaaaggcgacggtagaaccgattaaggacgaagatttttattttggccaagatgaagagcagatataatatctgctcttttggcttgaatggagaggtaagacaggaggaacggtcatgaataaaatggatgaaatcatcttggctgcaccgcggagtgacgtctttcaaaacgaaatgctgacatttcagggagtcaacagcgaagatgaacgtatcgtaaacattatggctcaaattgaggcgcatttttttgaaatcagaagaggcgacgcggaagaggacccgcgatttaaacagccgattccgtatgtcgtcatccgccgcgatgatgaggtgtttgtgtatgaacggctcgcgggcggaggggaatcgcgcctccataataagctttctctcggcttcggcggacacatgaaccctatggaaggggcggcttcattttcggaagtgctgaaacagaataccgaccgggagctggcggaagaactgtacattcgcgaggaggacaaacaaaacattgtcacactcggcctgatcaatgatgatgaaaacgatgtagggaaggtgcatatcggcatcctttctgcgctccagttagcgtctgcggcacaagtcgaagtgaaagaaaaagatcaaatcgccggccgctggatgaaactgagcgaactgaaagaggaaaatgtgtatcagcgtcttgaagcttggtctcagtttgtcgccgatatacttcaataacaaaaaacccccgttcgtccaaaaaaagggagagcggggttttttcatttagtcttgcacaatgaaggcatcaaatccggctttttcggcccgcgctgccaacgcttcagcgtaatctctggaagagaatgcgccgatctgcactttaaataagccgccttttggaagcacaatcgcgtcaaaacctttagactccgcatcggaggcaagcgcatcagcatttgctttcactttgaatgcaccgatttgcactttatataagtcagctttttttttagaccgaaagcttgctccaagcccttggcatgtcctcttgcaaggctttcaataaaactggctgttttcagtttgtttgcatcagctgacgtatcaacaaaaccattctccgtcaaaatcgccggcatacttgtctcccgcagcacatggaagttggctgttttttttcctcggtcattaaaacctgatgcttgaatcacttgcgtgtggacggctgattggtaagtcgaggtcggcgctccgacaccggggtaaatatagctttcgaatccggttccgcctcctgagttaatatgaatggataaaaaataatctgcgccccagctgttggcggcatccgttctttccgtcaggctgaccgtcttatcgcttgtcctgctcatcgtgacagaaactccttcatactcattcgtcagaatcgtgcgcaaagccagcgcgatctccagcgtgaccgctttttcctgaagtccgtttccggttgcacctgaatcagttccgccatgaccggggtctataaaaattttaaccattctccatcacctcattacagcatatgatgatattcaaatagtgcttgtacggctgtcattcataaaaaaaatgagaaatatacccaacatttcccggaaaataaaaataaatggtttgtcctcccgtttctgctgaatacaataagaaatgaaaaatatttctcgggaaagcgcaggattcaacatcattcccgaagagaacggaaaaagtgacagataaagaggaaaacgggtctcatgatgataggcggatgtcacggaaccgcttcatcatgagtaagataaagagagaacagagaggtgagcatgttggagcgcgctgtaacctataaaaataacggacaaattaacatcattcttaatggccaaaagcaagtgctgacaaatgcggaagctgaggcggaatatcaggccgccctgcaaaaaaatgaagccaagcacagcattctgaaagaaattgaaaaagaaatgaacacattagtgggtatggaagaaatgaaacgcaacattaaagaaatttacgcgtggatattcgtcaaccaaaaacgggccgaacaagggcttaaagtcggaaaacaagctcttcatatgatgttcaaaggaaaccccggcaccgggaaaaccaccgtcgcgagactgatcggcaagcttttcttcgaaatgaacgtgctttccaaaggacatctgatcgaagcggaacgtgctgatctggtcggtgaatacatcggacacacagcgcaaaaaacgagagatctgattaaaaaatcgctcgggggcattttattcattgatgaagcatactcacttgcaaggggcggagaaaaggatttcggtaaagaggcgattgatacgcttgtcaagcatatggaagacaaacagcatgaatttattctgatcctggcagggtactcgagagaaatgacacatttcctgtcattaaatcccggcctgcaatcgcgtttccctatcagcatcgattttccggattactctgtcactcagctgatggacatcgcaaagcgcatgatagcagagcgggagtatcaattaagccaggaagccgagtggaagttaaaagattacttaatgacagtgaaaagcacgacaagccccattaaattcagcaacgggcgctttgtcagaaacgtgattgaaaaatcaatccgcgctcaggccatgagacttttaatgggagaccaatacttaaaaaacgatttaatgacgatcaagagccaggatttacttataaaagatgaggcggcagctcacgaatagacctctcagccggtctgaggggtctcttttttatttctctctttaaaacccgccggatgtgtggtatacggcctgcgggtttggtatgatagtactactgcccaatacgacacagaaaggaacatccatttgaacgaacaggaaggaaaaaaagaaacggtcattttggtcggctgccagcttccgcacatgacagatgagcactttgaacattccatggaagagcttgcttcattgacaaaaacggctgacggaacggtgctgacccggattacgcaaaaacggaacagagcggatgccgctacatatataggcaaggggaaagtagacgagctgaaggcgctgtgtgaagagcttgaagcggatctggtcatttttaatgatgaactgtcaccgagccagcttaaatcactcgccactgcaattgaagcgaagatcatcgaccgcacgcagcttattttggatattttcgcaaaaagggcgaagacgagagaaggaaagcttcagatcgaattggcccagcttcaatacgcgctgccccgtctgagcggacaaggaatcaatctctcaagacaaggcggcggaatcgggacgagagggcccggtgagacaaagcttgaaacagaccggcgccacattagaaaccgcatacacgaaattaacgtgcagctgtcaacggttatccgccacagaagccgttatcgggagagacgtaaaaagaacggcgtgcttcaggctgcgctcgtcgggtataccaatgccggaaaatcaacatggttcaatcaattaacgagctcagacagctatgaagaagatctgctgtttgcaacacttgatccgatgacgagaaagatggcgctcccaagcggctacagtgtccttttgtctgatacggtcggcttcattcaggatctgccgacgacgctgattgccgctttccgctcaacgcttgaggaagtgaaggaagcagacttgatcattcatgtcattgattcatccaatgaagattatgccgggcatgaacagacggtcctcggtctgttaaaagagcttgaggcagatgatattccggtgctgaccgcttataacaaacgtgatgagacacttcctgacttcatcccgacagcgggagaaggccacatcatgatcagcgccagaatcgccggggatgaagcaaaactaaaagcggaaatcgaagcttatttgcgccgggagctgatgacgccgtatgaagttcatgtgcctgccgccgaaggcaaattgatgtcacgcatcaaatcagagaccatgatcgacagcctttattttaatgaagaaaatgaacgctacgaagtctcaggttatgtacaggaagaacaaagcatactcggagaactgaagaaattcatgtaaggaaggtatacacaacatgtttgacacactgacccacggcgctcttttacaaaaaaccgccgaagaaacagaagcggaaatctccgccgttcataaaagaatagaagaaatcagtgaacggaatgaatggagagtcctgcaaagctacagaaaacataaagtaagcgatacgcattttacgccttcaaccggatacggttatgatgatatcggacgagatacactggagaagatctatgctgatgtgttcggaggagaggcgggactcgtgcggccgcaaatcatttccggaacgcatgcgatttcaatcgcgctcttcggtgtgctgagacccggggacgaattgctttatatcacaggcaagccttacgatacactcgaggaaatcgtcggagtaagaggcggggagtattcaggctcgcttaaggaatttcaaatcggatacaatgcagtcgatttaacatcagaaggcagagtggactttgaagcggtccgggctgcaatccagccgaatacaaaagtgatcggcatccagcgttcaaaaggatatgcgaatcgtccgtctttcagaataaatgaaattgaagagatgattcgtttcgtaaaggaaatcaaagaagatgtcattgtttttgtggacaattgctacggagaatttgcagaagagcgggaaccctgccatgtcggagcggatcttatggccggttccctgattaaaaacccgggcggcggccttgctaaaacgggcggctatcttgtagggaaagccaagtggattgaggcctgctcttaccggatgacctccccgggaatcggaagtgaagccggcgcttcgctttattcactgcaggaaatgtatcaaggtttctttctcgctccgcatgtagtggcgcaaagcttgaagggagcggtatttaccgcccgttttcttgaaaagctcggctttacgtcaaaccctgcatggaatgcgccgagaacggatctgattcaatcagttgagtttcaggaccctgataagatgatcgctttttgccaggcgatacaatatgcttcaccgattaatgcgcatgtgacgccttatccgagctatatgccgggatatgaagacgatgtcattatggcagcgggcactttcgtacagggggcaagcattgaattatcagcagatggacctatcagaccgccttatgtcgcgtatgtccaaggaggattaacctacgcgcacgtgaaaaatgcgatttgcagcgccgtaaatgctttaatggaaaaagagctgatttaggccgtttgcaattttcaaagaatttgatgttaagattccttacattgtgttgacacaaaatataacatcacctataatgagactaagataagaaaaggaggaaattgagatgagtgataacattcgccgctcaatgcctttatttccaattgggattgtcatgcagttaacagaactttctgcccggcaaattcgatattatgaggaaaatggattgatatttccagcgagaagcgaaggaaatagacgattattttcattccatgatgtagataaactgttagaaatcaaaaatctgattgaacaaggcgtcaatatggcggggatcaaacaaattctggataaggcatctgccgaaccggaagaaaaatccgaaaaaaccgccaaaccgatgaagcacaatctgtctgatgacgaactcagaaagcttctgaaaaacgaactgatgcaggcaggccgtttccagcggggaaatactttccgccaaggtgacatgtcccgattctttcattaatccgttagcaactgttttgctatatacatttaccttttagaggaggagttttacgaaatggcaaagtacacaagagaagacatcgtaaaattagtaaatgaggaaaacgtaaagtatatccgccttcaattcacagacattctcggaacgattaaaaacgtggaaattcctgtgagccagcttgaaaaagcacttgataataaatgcatgttcgacggttcttccatcgaaggtttcgtccgtatcgaagagtctgatatgtacttatatcctgatctgaacacatttgtaatcttcccatggacggctgaaaaaggtaaagtagcacgcttcatctgtgacatttacaatccggacggcacgccgttcgaaggtgacccgcgtaacaacctcaaacggattctgaaagaaatgaaagaactcggtttcagcgatttcaatcttggacctgagcctgaattcttcctgtttaaattagatgaaaaaggcgaaccgacgcttgaattgaacgataaaggcggatacttcgacctggctccgactgacttgggagaaaactgccgccgcgatatcgtgcttgagcttgaagaaatgggctttgaaatcgaagcatctcaccatgaagttgctccgggccagcacgaaatcgattttaaatatgccggtgccatccgttcttgtgacgacatccaaactttcaaattggttgtcaaaacgatcgcccgcaaacacggtctgcatgcgacattcatgccaaaaccgttgttcggcgtaaacggttccggtatgcactgcaatctatcactctttaaagatagcgttaacgcattctttgataaagacgctgatcttcagctgagtgaaacagcaaaacatttcattgccggtatcgtaaaacacgcgacaagttttacggctgtcacaaacccgacagtgaactcttacaaacgccttgttccgggctatgaagcaccttgctacgtggcatggagcgcgcaaaacagaagcccgctgatccgtatcccggcttcccgcggcatcagcacgcgtgttgaagtccgcagcgtagacccggcggcaaacccgtacctggcgttaagcgtattgcttgcagcaggccttgacggaatcaaaaacaaacttgaagcaccggctccgattgaccgcaacatctacgtcatgagcaaagaagagcgcatggaaaacggcatcgtagatcttccggcgacactggcggaagctctcgatgaattcaaatcaaacgaagtcatggttgcggcgctcggcgagcacctgttcgaacacttcatcgaagcaaaagaaatcgaatgggatatgttccgcacacaggttcatccgtgggagcgcgaacaatatatgtctcagtattaatctctcaatcccttggcactattggtgtcaggggattttttgatttgttaacaaatttaataatttaatatagatcatacaccacccacaaaacacccacaaaaaatcaataaaaattactccataattgtggagatataatcctcattcatatgctacacgtaaaaaaaggtatgtcatcgctattgataaactccatattgtattctcgttttttatttgttttgatgatccattcgtttttcttttccagctacagccaattgaacctcttttttgtggaaaaaccacgcttagacttttctttaaatttttgaaggaatcggttgatgctggtatcagcctgtttccttcaatcagagattctttcatattaaatgaactgaaggttaagcagatggaaaggccaaaattccccctgcctgacggtgttttcaaagtcaccaacccattaaccagaggcacagccgtaaaacaaatacagacagcgttggcggctctttatttctacccggataaggggacaaagaataacggtgttgatggcgtgtatggtcccaaaacagcaaatgcagtcaagcggttccagtcagtaaatggtctgactgttgacggcatttatgggcctaagacaaaagcgaaaattgaagagaaattgaaggataacaggagttagtagtatcctttattatcatattgtgtcaaatttatgaagtttaattcgaatgggaggatttgttaaatgaaggcgggtattattacagtgacttaattttaaaagggggaaatgtgaaatgaaaaagtcgttagtatcaatgttttttgttctgattttgatgtttactgctatgggaagtgcatcggcctatgaatttaaaggtgtactgcctcttaatgacaaggtaagtggatcttttgctgatgccgctgctgctaaagaaggacatgagtggcaattccatccgggagcagctacaaaagtaaagttttatttgtctaaagatagtacaacaactccgttaaaagttagtatttacaaagaagatataaatactggaaaagtaactcttgtaaattcttatgattcctcagaattatcgaagtatactattgcagtcagtaaaagctatacttatagcatgagggttgccggatatagcactgcaaaaactggcggatcatacacattagaaagttctgtaattcagtgaaaaaaagggagcgatggctcccttttaaagttactataagttttttgagtctttattaattccatctccagttaattgctccgtcagggtaaacagcaggaacaatgattcctcgtttgctgctgttctcgtcaatgatgtaccaattttcatcttctaaccattctttatcgtagcgagtttcatcaagttgtccttcttcatctataagatcattaaatagatccctgaaaacttcaatttctttttcaggttttagaattccatacatccacattccctcaccggaaacatcatgaatttctcctaatttcgtacctttaaaatataaaatcatctattttgactccttttgatgcaatttaaaatactcttttggtatttcgcctcttattgcttatcattcttaattagacgttcaatttgtttcggaaataaaatagctactccttttacttctcctgattgaatggcctttcgcaaagccggcagattcaattcaatagaattatcaccgtaattagttattacatttttattcattgtgaaattggtgtacggactattggacttttgagcttctctatatcctcctaaaatatgttctgttactgtgacttgtctgcctttatatataccttctttatttattggcacaagatttccggtttccggatcaatatgtgattttcctaagccgttagctgctttggtagaatataaatctttatcccatgatagaggtttgaagatttgccggctcctgtgcttgctttcaatacttttcccgttccaattgctcctacaggtccaagagcagctagagcgctattaaaactgttctcacgtctctcctcagaaatcttatttccaaacatatcccggccagttatagcctcactaaaaccatttgcagatgcaagtccataaagtcctttgctggagttttgaagggcagggaatgtcttaggtgttttatagatatcaagcgctttgtctgccctataaatggctttgctcgttgagtagaaagcctttccgcctttggctaattttccggcccacccgacaatcggaatataccctgcagcagccattcccccggctgcgacccgttgcccggcagtaagtttttcacctgtaacggggtcaactccatcagccgcccttttataatcataatatccggtaacttcacctgtaaaatcacaaacaacatcccatgttttttcgtaccaaggcctgttcgcaagctcttcctgttcctttacaattcttctttcatcagcctgttgctttttgaacgaaagatattcggacgactgtttatgtaatcctgcttgcatctggtggatttcactttcccggtacgccttgggcattatagttgagcggggtggcgtttttgcctttccctgtcgcatcttgtaatgcctgaaaatctgccataatgaacgcctcattagcttctaacagcccatatttatttgaaagattgttatccagctcaccaatttttgggttgtatcagaattatctaatttttgatccgcgttatcggttgaaaagagatcgagcggcagtatatctgcgatttcatcaaggatacctttcatttcgttgcgctgctcttgcataatcgcttttgatttatcaagtgcgtttgtcaattcatgttcaaggaaagattcttccacataagagtctgaaaggtcggcatcttcaatcatagcttctatgtttgtgagaaacgcaattttcatatcaatcaattccagccattcatctgtgacgccagcgtgatcttgaaataaagctttgatgttatcggcgcctttgcccgaaaaatcgctgtcgcccaggtctgccatgccttggaacgcatttttcaggttcgtcatttggctgcgcaattctttgtattcgtttgcgcgttgtttggcggcagaaagcagggtggttgcttcaatgattttcatgatcatatcctttcgtgataaaatgttattcaaaattttaccacgatgaaacccggagtaaatacataacaaaacttccaaatacaaaatagttcttttggtttggtttatttttacttttagccttcgattcgaactttaaaaaataggttgaattgccctttcatctgattggaattgcggcatgtcgaaaattatttctatatattacatattatgctaaacatatgctagaatgttgtttgagaaaatttagaatatttgcagaaagaggggtttatcgtatgagtaaactggcttctgaaagagttgcaaatatattaaatgattggtatatcgcgataaaacaacaagacgctgagtctgctgagaaatattttgaagagatcaaaccacttttagatgaaatggaagaggatcaagaggttttaatgtattattctctgctggaagaaaggcataaaatgcttttgtatcaggttaaaggggaggaactgccgcctcattcatactttaatgagaaccacgctgatgaaatcctaaaaacagaccatatgattgaatattatttttatttatttgaagcgcttttcgagtcatataatagaaatttcgagagcgccataagtttatttaatatcgctgaaaaaaaactttcattaataccggatgaaattgaagctgcagaattttattcaaaggttgcctctatgtacatgatgttgggccagaacatcgtatcgttaaattatataaccaatgcgatgaatatctttaagaataatgaaaattacttgaagcaatttgcgacgtctttaatggtggttgctcataattacactgaattgggacaatacgaaaaatcggaggaacattatttacaagcaattaaagtggcaaagaaattggatgattcatttttcgtggctatgattcatcacaatttaagcattacatattcagaagcgaagcggccgcaagattgtcttaatgccattaagcatgcattaagaaataaagagtggtgtggatcatcgtattatataaattcattatatatgatcgcaaaagagctggtgatgatgggggaaaacaataaagcatcatattatttgaaaaagggacaggaaaatcttagacagaaacagaataaaatatacgaagctaaaataaatattattcatgagctttcacaaagtcctttaaatgagcgtgttgatcggattcacagtcatatgaacagattagcagaacaaaatgactttgacagcattcgcgatctagctctaatcacttcaaaaaaatttgaagaaaggggactttataaagaggctctaaagttttctaataaagctattttagctgaaaagaaaatgaagcagttggagggaatttgatgaaaaagagaattctttttgcggcattatctgttgcttgtttgagcgggttagctgttgcgggctttatggggttttctaataaacatgtagctgaaaagccagtcggtacttatatattagctgaaaagccagtcggcacataataaaaaacaagtctcaattaaaagatgggggtcataatatgacaaaaggcgttaaaataacattatggagcatcttagggatagtcatcgtgttaatgataattggagttgtctctttttatcagaccccatcttcataaagcgaaaacatgtaattaatctctttatacgtatacctttagattacaataaaaatctaaaaagaaatagatgtggggcgcccacaaagacacccacaaaacacccacaaatataatattcttgatgatttcctattcgaagagaaataacaaaacctttttaattcaacgtttatcatgcattttgacattgaaatattgcctaggttataatccgcacacaggttcatccgtgggagcgcgaacaatatatgtctcagtattaatctctcaatcccttggcactattggtgtcaggggattttttggttttggtcataagattaaaagaacaacatttttggtccttgaccaaaatatgaccaaaaaaattgaagttatgaatctaactacataattgaggacacgtatttattgtaatcccttattcggtttaggatgaaggctaaatgaagccaattatgttctaaaattgaaccggccatttttatttttaaaaagcaggagcaggaaattcatcaattttgatacgaagtaaactataaggtttctgtcgtaagtcctttccataatgaaatctagcctgccgatgtaattggttcacgatgacatataagtattcatccggaccaatcgaaaaagtatccggccataaaattctcggatcatgtgcgatggtttccattgtgccattcggcagcatctttcgaatactattgttctcataatctccggcataaatggctccttttgcatctgtaatcattccatcagacgcgcctttttctccccaatacgccacatgataaagtaaatccatgtccggtatatttctatctctcagggcttctgttgagatcgagaacagatgacggctggtcagtggacaaaaaaataatacctttccgtcaggagaaatcgcaataccgtcggatgccagcctaaatggggaagttgaaccatccctgttacgatccatcaaaattttgccttctactttcggtataaaataggaatccggtgaagttggatttgctccatttaaccgtctaaatgcgtttccggtttctaaatccacgacgataatagctcctggtcctttggcagaagaatccgttatataggcataacctgcagttccaacacgaaaatcaaatcggacatcattcaggtaagttgttggaaggacaacatcttctgtaaaggtataaactcttctgattgtattggtttttaaatcaacagcgactaattttgccccgcctttaattggttcagaaaaattgggtgccgccgtatctagtacccaaagcgttcctcttccatcagtaactacactttggacactgatgaaagtcattttgatattctcagggttaaccaaattggtttgtaaatcaggataaggctgcaatttatccccaactatctccgccaccgtaaatttaacatcgtctccccatttcggaaaacaaatgaaaatacgaccagtttctgaaacagtaacaccggtaggcatagctccataaaatgcataaaccagttctaaatccccaaaatatttttcaaaaggcagcataggtttcataatatcctcctcaaccaattaaacgggatatcacttatatatgattcgcattttttctagtgcatgtttcttattaagtttttctaaacaaaagatgatggaagtgcttatcatttaataaatcagtcaggtgacacaggggggtttacttaacgtctgtcgaagcagtcggcaattacaacatggtatgtcctttggtcggttttaaattctctgaaaaaagagttgaaaaagcagaaaagattttataatatgaaatcaagttagtttgttcgggcaacaaactaataaaaccactttaattgtccatcatgtaaaggtcttaaatgggagggggataagaggctcgatttaattggaggtatataaaaagcgaaagccaagcttttatcctgttcactgctatctgatcaccatttggatgttgaaaatgctctgtgaaagtaaaccgctatcatttttttgaaagcgcttttatataccgctcactggccgataattttaaaaaaatgttataccatttcatcatgttccttatgtaaaggatcgaaaaggggagaaatcatgctcagtgaaaatgtaaagaagatcagcatggttgaaaaagttggatatgcgtctggagattttgcatgtaatttaatttatgcaacagtgtctacgtatcttttgttcttctatacagatgtttttggtttatcggcagcagcagccggtacgatgtttttagtggttagaatcatcgacgctctcgctgatccttttattggaacaatagttgacagaacaaatagcaggtttggccgcttcagaccgtatcttttattcggagcttttccctttgtcatattggcaatactctgttttacaaccccggatttttcggataaggggaaattaatatatgcctatatcacctatgtcggcttatcgcttacatacaccatgataaacgtgccatatggcgcgttaacatctgcaatgaccagaaataatcaagaagttgttagtataacgtctgtccgtatgttatttgcaaatcttggaggacttgtcgttgcattttttgttcccttactggctgcttatttaagcgataattccggcagcgaatctcttggctggcagctaaccatgggtattatgggagttataggcgggtgccttttaatcttttgttttaaaagcacaaaagagcgtgtcacgcttcaaaaatccgaagaaaaaattaaatttccggatatatttgagcaatttcgtgttaatcggcctctagttgtattaagtattttctttattattatttttggagtgaattcaatcagtaattcggttggcatctattacgtaacgtataatttagaaagagcggatttagtgaagtggtacggtttgttgggaagtttgcctgctttggtcattttaccgtttattccaaagcttcatcaactattagggaagaagaaattactaaactatgcattattactgaatatgatcggcctcttagctttacttttcgttccgtcaagtaatgtattcctgatactttcctttcgattgctggctgctgcaggaagtctcactgccgggggatatatgtgggcgcttattcctgaaacaatagaatatggagagtataagaccgggaaaagaatgggcggtcttatatacgctattatcggatttttctttaaattcggcatggccttgggaggggttgtaccgggtttggttctagatcagtttggatatgtggcaaatcaggtgcaaacgccggaggcattgacgggaattttaattacaacaaccattattcccgtggtcttactggttctggccatgattgatattaatttctataacttagatgagaaaaaatataaaagcatggttcgagaattagagaatagagacaaagtttatttggatcatattgacgatttcaaagcttaaaacatgatgagtcaacagaaaatagctgaggaggagttcaaaatgaagattatcaatccagtacttaaaggattcaaccccgatccgagtatttgcagggttggagaggattattatatcgctgtatctacatttgagtggtttccgggagtccagatacaccactcaaaagatttagtcaattggcacttagttgcacatccattacagagagtttcgcaattagacatgaaaggaaatcctaattcaggcggggtctgggcgccatgtttaagttacagcgacggaaagttttggctgatctatacggatgttaaggttgtagatggcgcctggaaagattgccacaattatttagtgacttgtgacacgattaatggtgattggggggagccgatcacattaaacagctcgggttttgatgcttctttgttccatgatacggatgggaaaaaatatttattaaatatgttatgggatcagcgtattgatcggcactcctttggaggcattgtcatgcaggaatattctgataaggagcaaaaactaatcggtaaaccgaaagtgatttttaaaggaactgaaagaaagctgacagaagcgccgcacctttaccgtatcgggaactattattatttattaaccgcagaaggaggaacacggttcgaacatgctgctacaattgcccgttctgcaaatattgagggtccatatgaagttcatcccgataatcctatcttaacgtcatggcatgcgccggaaaatccgctgcaaaaatgcggacatgcatccattgtacaaacacatacaggtgagtggtatttagctcatttaacgggacgtcccattcatccggacgatgattcaatttttcagcagagaggatattgtcctctgggcagagaaacagctattcaaaagctctattggaaagatggctggccttatgtagcaggcggaaaagaagggagcttggaggtggatgcgccttctatacctgaaacaatgtttgaagacacgtatccggaagttgatgaatttgaggatgcaacattaaatattaattttcaaacgttaagaattccgtttacggagaaattaggttcattaactcaagcgccaaatcatttacgattatatggccatgaatccttaacttcgacatttactcaggcatttgtagccagacgctggcaaagcctccattttgaagcggaaacggctgttgcgttttatccggaaaattttcagcaagctgctggtttggtgaactattacaatacagagaactggacggctcttcaagtcacgtatgatgaagaacttggccgtattcttgaattaacgatatgtgataacttttctttttcacaaccgttaaaaaataaaattgtgattcctcgtgaagtcaagtatgtctatttaaaagtgaatattgaaaacgaaaaatattattatttgtattcatttaacaaagaagattggcacaaaatcgacattgcattagaatcgaaaaaattatcagatgattacatccgcggcgggggattctttacaggagcttttgtagggatgcaatgccaagatacgagcggtcatcatatttcggccgacttcagatattttcgttataaagaaaaataatgtgcacatgaaaaaggagatttctattttagaactcctttttcatattagaaggtgcctatgtcagtattgattaagaaatactcctagaataaaaaaacccatctttaaagatgagcgtaaaacatagaagtatgtacattcagttatgaaccatgtcgagaaaatgatcaataacaatagaggacattcctagagcaggggcattttttcctaagatagatggtaataattcatagctattgtctagttgggaataaaccctggatgacacttcgcttttaattgaatgtaaaaccataggatgcgattcaatgatgctgtttcttaaaatgatggcttgcggattaaatgtatttaaaatattggtcaggcctattcctaaatagaaaccaaaattctgtaatgcctgtaaagttccaacatcattcagatgggcaaggtctatgatatcttggctggacacttttttctctttcgtctgaagagatgttaataaagccttctctgaagcatacaattcccagcagcctcggtttccgcagctgcatttaggacccttaaagtctattgtcatatgtcccatttctccagagaatccgccaacccctctatataaatgattgttgatcataacgccgatccctattcctgtaccgatacttgcataaataatgttatcgtgattttttgcagcaccaaatactttttctccatatgcgccggcatttgcctcattttcaataaaaacgggcacattgaacttcttttggatgaaagattttaagtcaatatctctccagttggcgttcggagcgaaaacaattttttgatttttgtcaatcagcccgggcgcgcatatccctataccaataagaccgtatggagattgcggcatttttgcaataaagtgatgaatcatctcaattaaaatatctttagtgatttctggagaattgcattccaaatggtggtgttgatcaaggacgatcgtcccttcaagatctgttaaaatgccattaacataatccacgccaacatctattcctacggagtatcctgcttttttattaaaaacaagcataacaggtcttctgccgccgcttgattgtccctgaccgatttcaaatacgaggttttctttcattaatgtgtttacctgtgacgaaacagttgatttatttaatccggtcatttcagataattttgctcttgaaataggtgaatttttaagtatttcgtttagtaataacttttggttaacttttttgacaaaggcttgatcagcgatatccacttcatccactccatttgtataatctttaaattaagttgaacgttctgtgttatcgtgcgaaacgcagtacatagcgaatccaacctttattatatctaatgtgttcgtaaaaaactaaaaaaaatattgaaaatactgatgaggttatataagatgaaaataagttagtttgtttgggcaacaaactaatgtgcaacatgataaaagcatctgtatttgaatgatcatgtttagaatttatttttaagggggaaatcacacatggctcactctcattccggttcggtcaactattttgaaagcgcaaacaaagtgatttacgaagggaaagaatccacgaatcctttagcatttaaatactataattctcaagaagtaattggcggaaaaacgatgaaagagcatttgcgattttctattgcctattggcatacatttaccgctgacggcacagacatttttggcgcagctacgatgcagagaccgtgggatcactataaaggcatggatctggcgagagcgagggtagatgcagcgtttgagctgtttgaaaaactagatgcgccattttttgcttttcatgaccgggatatcgcaccggaaggaagtacgttaaaagagacaaatcaaaatctggatataatcgtggacatgataaaagactacatgagaaccagcggcgttaagctattatggaatactgcaaatatgtttacgaatccccgtttcgtccatggtgcggcgacttcttgtaatgcagatgtatttgcgtatgccgcagcccaagtaaaaaaaggattagaaacagcaaaagagcttggcgccgagaactatgtattttggggcggacgtgaagggtacgaaactttgttaaataccgatttaaaatttgagcttgataatatggccagatttatgcatatggcagtggattatgcgaaggaaatcgggtatacagggcagtttttgattgaaccaaaaccaaaagagccgactacccatcaatatgatacggacgcagcaacaaccattgcctttttaaagcaatatggcttagacaatcattttaaattaaatctcgaagccaatcatgccacattagccgggcatacattcgaacatgaattacgcatggcgagagtgcatggccttcttggctctgttgacgcgaatcagggtgatccgcttttaggctgggacacagatgaatttccgacagatttatattctgcgacattagcaatgtacgaaattctgcaaaatggcggtcttggaagcggaggattaaactttgacgcaaaggtcaggagatcttcttttgagcctgatgatttactatatgcccatgttgcagggatggatacatttgcaagagggttgaaagccgcccacaaattaatcgaagatcgtgtgtttgaagatgtgattcaacaccgttaccgcagctttactgaagggattgggcttgaaattgcagaaggaagagctgattttaagacacttgagcaatatgcgctgaacaatcagccaattaaaaacgaatcagggagacaggagcggttaaaagcgatattaaatcaatacattttacaggtataatgaaaaaagaagctccagatcccgctgtaaaaagatgcaggcagccaagttcccggaattgaccgtcatgaagttactgttatggcgggtcaattcaatggggatctatttagagaggaaggagtgaaaaaatgaagtatgtcattggaatagatcttggtacgagtgccgttaaaaccattttagtcaatcaaaacggcaaggtttgtgcagaaacgtccaaaagttacccgctcatccaagagaaggcgggatatagtgagcaaaatcctgaagactgggtgcagcaaacaattgaagcattggctgaattgatttcgatatccaacgttcaagccggggatattgacgggattagctattcaggacaaatgcatgggttagtactgcttgaccaagatcggcgaatgctgcgtcatgcgattctttggaatgataccagaacgacgcctcaatgtagcaggataaccgagacatttggcgatcgtctgcttgatatcacaaaaaaccgtgtccttgaagggtttacattacctaaaatgttatgggtgaaggaacatgagcctgaactttttcacaaaaccgctgtttttttgcttccgaaagactatgtgagattccgcatgactggcgccattcacactgaatactccgacgcagcgggaacgttacttttacatatgacccgcaaagagtggagcgatgagatttgcaatcaatttgatatttcagcggaaatttgtcctccgcttgttgaatcccatgactgtgtaggatcgctgcttccgagcgttgcggcgaagactgggctgttggaaaaaacaaaagtgtacgccgggggagcagataatgcttgcggtgctgtcggagccggtattctttcttccggaaaaacattatgcagtatcgggacgtcaggagtcatactttcctgtgaagaagacaaagaaagggactttaaagggaaagtgcacttttttaatcatggaaagaaggattctttttatacgatgggagtcacgctcgctgcagggtacagcttggactggtttaaaagaacgtttgcgccaaacgaatcgtttgaacaattattgcggggagtggaatctgttccgataggagcaaatggactgctgtacactccttacttagtcggtgaaagaacgccgcatgctgattcatctattcggggaagcttgatcggaatggacggagcccataaaagagagcactttttgagggcgataatggaaggcatcacattctctttatatgaatcaattgaactattccgcgaagcgggaaaatcagttgatacggttgtctctattggcgggggagctaaaaatgaaacgtggcttcaaatgcaagctgatattttcaatacgagggtggttaagttagagaatgaacaaggtcccgccatgggggctgcgatgttagctgccttcggaagcgggtggtttgactctcttgaagaatgtgcagagcagttcattcatgaagcagctgcattttatccaaaagaacaaaatgttcaaaaatataaaacactattcgagttgtataagaacatttacgttcacacaaaagatctcaatacagctttaaagagctttcgacaaaaatgaagaaagaacctcgccaaattggccaggttctttttatattgcacaaaaacagacacggtgatataatcagaacacgcgcgctttttgtgtgaaaagtcatagttatccatcttatattatgattatatcatgctgaaaagctcttgtcaaatttttttgaaggggagatatagaatgagttctttggttctcggcattcacgaaattgaaaaaacacagcctttgctcgtaggaggaaaagggttacatttaggggaattatcaaaaattcaaggaatacaagtaccggaaggattttgtgtcacaaccgcaggatatcaaaaagccattgaacaaaacgaaacgttacaagcgctgttggatcaactgaccatgctgaaagcggagaatcgcgatcaaattggtgaagtcagcaaaaaaatccggcaaaccattatcgaagcagaaattccttcagatgtagtcaaagcagttgcttgccatctctcccggttcggcgaagaacatgcctatgccgtacgttccagtgcgacagctgaggatttaccgcatgcctcttttgccggtcaacaagacacctatttaaatattaccggcgtcgatgcgatcttgcagcatatcagtaaatgttgggcgtccctatttacggatcgcgctgtcatttaccgtatgaaaaatgggtttgatcacagccaagtttatttatccgttatcatccaaaggatggtgttccctcaggcttcgggaattttatttaccgctgatccgatgaccggaaaccgaaaactgctatccatcgatgccggttttggacttggtgaagcactggtctccggcttagtctctgccgattgttataaagtacaggacgggcaaatcgtcgataagagaatagaaactaaaaaattggctatctatggacgaaaagaaggcggaacagaaacacaggagatcgctcttgatcagcaaaagattcaaacactgactgatgaacaaattttacagctggcacgtatcgggagacagatcgaagctcatttcggccagccgcaagatatcgaatggtgtttggaccgcgatactttttatattgtccaaagccgtccgatcacaacgttatatcccgttcctgaagcgaacgatcaagaaaatcacgtctatatctctgttggtcatcagcaaatgatgacggatcccataaaaccccttggattgtctttttttctgttgacgactgctgcacccatgcgtaaagccggcggaaggctattcgttgatgtcacacatcaactggcatcccctaatgtcagagaagttttcttaaaaggcatggggcagcacgacccgctcttaaaagacgcacttatgaccataatagagcgagatgatttcattaagccgatacctgataaaacggcaccgattcccggcaaaggcaatgcagatatgccggaacaagctgaaaacgatccggcaattgtttctgatttgattaagagcagtcaagcatcgatagaagagttaaaacaaaacatccagacgaaatcaggatctgatttattccgttttattttggaagatatcaaggaattaaagaagattctatttaacccaaaaagttcggtgttgattcgaactgcaatggatgcttcatcatggattaacgaaaaaatgaacgagtggttaggtgaaaaaaacgcagcagatacgctttctcaatctgtaccccataatattacttcagaaatggggcttgcgctattggacgtcgccgatgtgatccgcccttatccagaagtaattgcctatttagagaatgtaaaagatgatcactttttggatgggctggtgacgtttgaaggcgggcgggaaacccgtgacgctatctatgcttatctcaacaagtacggaatgcgatgtgccggagaaattgatatgacaagaactcgatggagcgaaaaaccaactgcacttgtccctatgattcttaataatctcaaaaactttgagccaaatgccagccagcggaaatttgagcaagggcggcaggaggctttgaagaaagaacaagagttattaagccgattgaagcaattaccggatggtgaacaaaaagccaaagaaactaaacgaatgatccgcatcatccggaacttcagcgggttcagggaatatccaaaatacggcatgatcagccgttacttcgtttataagcaggctttactgaaagaagccgaacaactcgcagaagcgggcgttattcatgaaaaagaagacatatactatctcacttttgaagaacttcaggaagtcgtacgcacacataaattggattaccaaatcatcagcacacgaaaaggcgagtataaagtatatgaaaaactatctccgccgcgtgttatcacgtctgacggtgaaatcgttacaggcgagtacaaacgagaaaatctcccggccggagcgattgcagggctgcccgtttcctcgggggtcatagaggggcgggcacgggttattttaaacatggaagatgccgatttggaagatggggatatattagttacctcctatactgatcccagctggacaccattgtttgtatccataaaaggcctggtcactgaagttggcggactgatgacccacggagcggttatcgcgcgtgaatacggcttacctgcagttgtcggagttgaaaatgcaacccaattgataaaagatgggcagcgaatccgcgttcatggaacagaaggctctattgaaatattataatagcgggggtgtgcagcacgtcaccagatatttcccgcattttactaagaaaagccggaacctcttagaggaggaatccggttttttttatgtgaaaatgactcaatgtgtgaacaccgcattttctgggtgagcccttcagtgactaaatctttttatgaaggtgagtaatatcctttttaagttcacaacatctgtaatccgatgaattaaaaacgccttagtaacaattatttaggggctatgttcatgaacaagtctttattcaaaacaaaatgacctattgggttaatggcgttaaagatgaagataagtctggtgtctttgaaaaagaaaagtctgcagaagatacaacgggcccatcatcaaacatgatgagcggttgaactggatatgtatcagattgtttaggcgataagaatattagccaatgagcaatcactggtttagctatttttatatggaactgcttgcgaattgttgattttcggaatcgtttttaaagaatggatcacaacgccttttggattgttcgcctcattctttatagcggcaatattggcgcaggcaggggtggaaactctcccgcttaccaggtaaaaataaaaaatgtttatctcagattggtttttttaaaaagtaaaaacgccataaaacttcttatggcgtctgtccgaactaagggatgcaatgtttgggagacgaatataaatcgtcaatgtgctagaaaaggaatgcagcacctacaatgattaacaaaatgaacagcacaacaatcaatacgaaagagtttccgccataatttccaccgtagttccccatattattgccacctcctgttgttaggatagtacataatatgccggacgataaaattcgacatagatttaagtctaaataagaaaaaatggatgttatgtctaaaatgaagagctactaaaacaataaaataatgggaggttaactgaaagagagaaatggatgggacggtttgctgtttaaagaggagggatatggctaaacatgcaataaaactgtgtatgaaagtggtgagccatgaagttacttcatcatgcagaaccacatacgaagaggtacagggaaattatagttaacgaaaatattcatcatttcccgggcaagcgcagtatacgacaaatcaaaacaaatcacaaagggacggaaggtaagataaaaggaggctgcttgcgggtttgtggtgcagataaagtttccgtttcataaaggtcatatgtttattcgaaactttacgtttattcctgcagaatgcttgtaaaagaaagtcggcaaaactgccgactttcctaacggaatttagatctcaacagatctaaagaaaccatcgacactatcaccggtgccgctatcatatttcaggatgtattctcctttttggttaacgctgaattcttgaatgaacgttttccccgcatttaatgtcgtagaggatataaggaagaagctccctgattgagtgaggtataacgatgaccggggcggctgcggatcaactgaaacgaagtatattcccaggcaaggagtatttctttaacctgaaacttttataaagcattaacgtattactttataaaggtaaataaggaggcttatgaatgggattaaaaaatttctttaatactgagttaaaatgctctatctgcggaaaaacattaaaatcaggggatgagataacagcttaccttacacttccgagtgtgaagaagatgcctgtggggagaatggataaagtgttaagcaaacactctgataaggtctgctgtaaaaagtgcagtgagtaggtttttagtgttatgaggaacctctggcgggtttcctcataacaaatatcaaccaattaaattagaaaaaagcgaaattgtgatgattaaagtagataaagaactgagggataccaaagggatcatttttcgtttactttgcttttttgaaggtttgtttagctcgtggatcactgcaccccataaaagcatggatgctaaaatgataagactcatatgtaacaacactcctttgtttctataaattttaccatatatatcacaaggatgtcgattgaacgaacatctctataaaaagaagatgtttatctaaaattgttgagagattcagtgaactattatgtagattaaattagagaagttcgaaaaaggcctcaaattactcagtgaagatgaatatgaagaggttcacagttcatatcctacagttgctcaaacgttcagtcacatctgcgcggtggatgttatgtggctgcaagtgcttaaagggatagacatgcaggaagcattggaaggttctatggcttatgcggaaaggactcatttgtattctgcagatgaatttgcggcgtcttatgaagaactggcttcacagtttgaagaatggatgaatagccaaacagatgtagaacaaacaatgaacttacataatccttggttaggttacagagaaactgcttactcagaaattttattccatgttgccaatcacggaacttatcatcggggcagcataacaactatgttaagacagcagggctacgcttcggcaatgaatgacctggcattatattggtatcagggttagttcaggcagtacttgcaaaatgaataaccgccgaatggtctgtaaagtttcttttctgaactaaatgacaaagtctcattcagtctgggtggggcgctgagcaagaatagagatcaaaggctgccgtatcattcccggcagccttaatgattaggaagtaaaatcgataaccatgcggccggtcactttaccttgctccatttcttcaaaaatatcattcacatcttcgatcgggcgttttgtcactttaggtacaactttaccgtctgcagcaaattgaaaagcttccttcaggtcttctctggtacctactaatgaacctactacctgaatgccatctaacacgagacggggaatatctaaatccattttgtccaccggtaaaccgacagcgactacgcgggctcctgcttttacaacatcaatcgcttgattgaaaggggttttagagacagctgtgatgaccacagcatcaagccctaaatcgttagtcacttcttttgccttagcgacggggtcttcgtttaaactgtttacaaccgcatcagcgcctaagctcttagcaaaattcaatttttcgtcgctaatgtcgaacgcaatcactttagcgttaaagacattttttgcatattgaacagccaagttgcctaaaccgccgactccaaatacaccgatccattgacctggcttaatttcactgactttaacggctttataagttgttacacctgcacaagtaatgctgcttgctgctgcagggtctaaattttccggcacctttattgcataatcaaccgctacgattgcttcttcagccattgcgccgtcaactgtatagccggcattttttacatcgcggcacaaggtttcacggccagttaagcaatattcacagcagccgcagctttcaaacatccaggcaatagagacgcggtcgccctttttcagacttgttacaccttcaccaatctcagttacaatgcctattccctcatgacctaaagtgacgccagtaacatccccgaaatcagcatttttaacatgtaagtcagtatgacatacaccacagtattccatcttaactttggcttcaccatgtcgcaaaggacgtaattctttttgtacgatcgctatacttttgtcttttgttgctactactgctttcaaatcatacacccctttcgaatattagcagaaaatttttacttatcttacaatttagcacactgctcttattttgaaaacccttacattttttgcggacaagtgtctctacaaaagttgagggagccatgcagggaggaatctatggatatcatgtgtcatctccaaatgcacagaatttacatatatacataaatggatgcgttttcaaaagaggctttttttgagcgataaaaagctgacggaagataaatttgacaatcaccggctcactaagtttttgccctttatcagccctaaccctattacatcatgtaatccggttcaaagataccttaaaatcgataaaacctcgttcataagtccgttttccagcgtgaaaggagacgtgagtttaagtagcgccaaatgctgctattcgtgcgattagttcaaatacaaatcttcaagagggagtcattttacatgatttgttaacaatttgtttcagtcaaagataaggcatattccatttatatcggaaacaatgtaagtgtcggacatgatactctcatttatggcccttgttatcttggaaatcacacgttcatcggttttaaggcaatcgtgtacaatgcaattataggaaaaggatcatttgtttcatacaatgctgttatcacaaatggtgtacggattgcaccgaatcggttcgttcctcccggtgccgacatagatacacaagaaaaagctgacagactcagaagagtgacagaagaggaacgtgaatttgcacgggaagtgcagcgcgtaaatcaagaatttcccgcttcttataaagcgttattcagctaacgaaaagcaaaatgcgaatatcctaaattaaattaatgcatgagaattggcgctccacgatgcaaggccagataagttttgggaagagtcagatttcgctcagggatccacaaagggaagagatgaaagctgttcatcggatatttgtggggaagctgcaagaagggtcgaaggtgagcagagcggcggattaaaactgaccttcccgcaaatttatcccaataggactgacaggaggatacaatcataaaaataaaatgatgcttcgcgaatgagcctaaaagcggctcttttatgatgcttctttgacgctttaatgggaaacgcagcactcatggttctgctggataagacagcttttcttatacaattagacatcttacaagttacttatttttacataactgttggaaatggtctttccatctgagataataaaattcatcttgattgatacatgggggagtaaggatgggctgtttttatcaagcggcacgcaaaccattttacaaacaaattcctcaagcggtttttataaccgaagaaattagtgctttggataaacgctgtaagaaggactctctgtttaaataaacgaggtgaaaatcaatgaatggtatagaattcttagaatctgtgtcgcgactcggacaactcattttggtgttttccagctacgccgtttattggaaattagggaaaacaaaaagggaacgaagacttacaaaattcgaagctttgcttaggttctttgtaatgtttggtctatgtgcatgggggctgtcgtttcttgctttgaatttgtggtcgtaatcgttctgccgatatttgacttaatgggctgttacaccactttacactttcgggaaactcactagacatcatcttctgatactgtctttagtgattcaataaacgatgtaatattgtatttaaaatattatgtgcgaacattcatcatgagaatcggacgtattccgagcgtatttatggggaaattgactgttttatgatgatgtgttaatattatgcagtaaaaatattgaactattatgtgagtattagattacggaggtacatatgaatagaaaaagtagtatgttaatgaaaatagtttcctcagtttctatcttgggcggtgtaggttttgtaactgagtcaggttcacaaacttcttttatgaataacgtagcttctgctgcggaagcaggcattcttcctagtgaaaatgcttcattattatctgagtcgggagatataagtcattatcattttgttaattctagttctgtttttaattatgctgataacaaatgggtttataaatcatctacaacaccaattaaagatgttaaatcatttgatggcaaaaacctatatgctactgcggacgatggttattatgcaaaaatactgaaatggaataatagtttaaaagtatgggatcaacttgcgagttttagaggcgggccaatttttgatttaatcaaaacaagtgataataaatttgctgccggtggaggagaatcacgcagatatgggatcagttcaacaattttcacatcaattggcggtgatgcgaactggtcacagaaagtcagtggttataaatccaaagagtcaagttacaccacgggtggctacttaggtgtcgtgtacactggagttgcaattgatgataagattcttatgttcggtaactcatatgctacaaactatataagtgagtcttcagatggtattaaatttaccagaaaaggaagttttgatggtgaatattttgatgctatttacaatggagataaggtggtggccgtaggacaacaagcaggagggacatttagcgattatggtttagttgctgtttcatttgataaaggcgaaagttttcaaacgacggtactggggtataatgctcctctgaattctgttacttataaagatggagtatacattactgtaggagatcttggatcaatttattattctgaggatgcgcacaattggactaaagcatcttcccctacagccaacaaactaaatgatgttgaatgggattacgtaaataaacgttttgttgcagtaggggattccggcactgttttattctccttagacggaaaacgatggatttcagtaaacagcggaataaaaaataatattaccaatgttgttatgatggaaaactcataatgacaaatgaaaaaagcaatacctttttaggtattgcttttattatattaattcgactaattctaccacttaaatcagctgtttaattcgtgaggagagttatatattgaggtatattaagttacttagctatacttttttgcagaactatgtgccaaacatagtatcctcctcctataaccaagctgaatatgttccttaattaataattagtggcgtgttgataggctattttagttttgtaattagtctataaatgctctttaatattttgttaaataatgtatgataaggaagtggggggggatgaatatgaaaaagatagggttgggtatcgcaggagtttttttaacatggtgcttggggatcggaactgtttcggccaaaatgacaaaagatgaacataaggtcagctttaaaatgacagagaatgaaacaggtttctttatggctgacgacaaaaaccttcattattggccgactaagctgggatacaggttcaccatctacaatgctgacgggtgtacattgaatatcaaactgcagagaattacactggcaggagatgattttacccttagtgaaaagaatttcacgggtaatcatttgaacttgagcgcggctgataaggtgaatggtgatgcaaacagaaatcattacttattgatcacaaaaggagccggctgcggagatgtgtggattaaaggcttttacggattcgaacacgatgagccggatgcagattggtgagcgatacacagtcaaggtatttccttgaccttttttaatggcaaaaaatttctggatattaagatagtgaattgatgatctgccaaaaaaacatagatcttttaaagtgatggatatatactgattttaaacaataggaaaaaaatgaaaaatatatttttataaaaagcaggtgaaatatatgggagcggcgacttggagcaaaaggcaaagctatacctaaacattggttttttcaagtttgtcgtatggtttgatcttcgggctatatatgtttgtatactcgggttttgtgccatttgcattggttactgtggttatcattgctttttacgcatttattacttactttttgtttgctgttcctgtgcaactatggctaagaaagaagcctaaaaagtttagcttggttcatcttttcatttatacagcagtcgcttttttagctgtgttcttgttctggcacatagataatccgtcaattgatttcacagttttcagaagtttcatttattacataatgagcattgttgctgcgttcatatattggttctgggactctatatttctgagaaattacaatgttcactgcaagtaaagctggtgttccaaaagaaagcgggtgaggaaaaatgaaatacattgagttgactagaggcaatattgatgacaatcatatttgctgtgcattaggtacgaaacaatatgaggatgcggtaaatgaaaagaagagctggctcaaggatcggatgattgatggcttggtgttctatcgcctaaacgaacgggcaaaagtttttattgaatatttacctgcagaagaagcgtgggttccggtaagcgcacctcattttatgtttattaattgtctttgggtctcaggtaaatataagaataacggacatgcgaaacacttgttagaaaaatgtgtgtcagatgcaaaatcccgcggtatggatgggatagttcatatagtggggaagaaaaaactcccttatttaagtgataagcatttctttgaacatatgggatttgctgtgcaagatgaagcagaaccctattttcagttgatgtcactgacgtggaatgaacatgcatatcctcctgtatttaaaaaacaggtgaaaagtaattccgttaatgatgagggaatcacaatattttatacagctcaatgcccatttgcagtcggattgttaaaggatttaaaggaactgactgaaaagaaaggacttcattttcaggcccggcgaataacgtcaaaagatatggcgcaaaaatccccggcagtttggacgactttcagcgtgttttataatgggacatttctcactcatgagatgatgagcgtgaataagtttgaaaaaatactcaataagcttttaatggcttaactttgttttaattactattcctcgtttctatattcgatactgagggtttttcacgaaaattgttcagtactttacatcgcgggcggcaaatgaatgattattgtttttgacaaagatgataacgtccatcattatagtaaaaatagattgagataagttcttcaacaaacgaataagatctgttgaagaagttcttttcaaagatcgataacaatgaaacaggagactgcaaatgcaaaaaattgaaacccttcgcttaattttaagaaattttaccgagagagatgcgcaaggtctgttggaatattctgcacatccgagagtgaattgctttcttgatgacagaatgtctacgttagaagaagctgccgtaaacgttcaaaaaagaagccgagatgactcttatattgcagtttgtttaaaagacagtaatgatctggtcggagaactattttatttaaaagaagagccagatacctattctgtttgttggaatttcaatgcccgttttgaagggaagggatacgcaagtgaaagtgcgaaggctttctttgagtatctctttatgcaaaaagaagcaagaaggctttatgcatatgttgaagatgataactgcaggtcacaaaaattatgtgaaagattaggaatgcgtaaagaaggttattttcttgaatttatttcatttactgcacacgaggatggaacacctaaatatgaaaacacttaccaatacgcattgctaaagaaagaatggttaaaacaaaaacatagttaatagaatttgtggggaaataatctcccctttgtcgaaaaaaccttgctgaaagcaggtttttttgtatttaagttaaatacttcattaggttaccgatcataccaatggattatggaattgaaaaaagtacttagattagtaacgatcaaaaagattaagcttgaaggttgggaaaatcatgaaattcattaaagcaacgttgtaaaattggagagaggatgaatgtgatggacattttgcagtttagcgacagaaggagcgggaagtaatcgaatcagcaatgttcaattcattttgatgaatttaaagatgcgctcgagaatggaaaaatggttgcgaaagataatatgcttttgagaaatcaagcaattaacgcttataaaacatctatttaattttaaatcggcgtttcaggtgaactttatatgatttcttttttcgtaaacatatttaaaaacgaaataagaattaaaatatgcagacaaagcagcgaagcatatcgcataaaaggtgttatcagaagtatgaccgttcctaaaaataaaacttatgaagaaaggaactctaacgtgaaatcaaatttagtttcgtttctattagcattgtcaggatttatattcagtatttatatgcagtcaatggcttactggagcaatgactctatgctgtggtattgggtcggtgcggttttgtcgtatctatttgctgcaggatcaatggttactctgattcttaacaaaaacaaagactcaattctaacaataagttgtctcattttaatgattgtaaccgttatgcttattttagtcacaactttttggacgacttttatcattattgcatggcaatctgggatgtgaagctaaggggaatatgatcttcttagtatttttttattcctgggattagaatccctttttattattctttcaaattaaatgtaacaattctaatattcatacgttctaaatgataaaggcgggatgtcatgaaaaaacgtaaagtcattaaaaaattgctggttattatcactgttctcataatagcagccggatttgcactgttttctttaatttcaggagaaaaagttaaatatatcggctatagccaaagcaagactgggaagcgtcaatcgaaaaatcaggcaagacatctatcggccctaactatttcttgaatttgtattacagaggtaataaagtgaatgaaaagaacacggtgattaagagattaacattatttgttgacggccggaaatatggtgaagataaagactatcatctttcagaatacaccggagagaaattagaaggcggcggaacgggagaagaccatattcaaacgtttgaatatatgccggaaaatgaagtgatcggtcatgaaatcactgttgaagcagcatggaaaaccgatcatgagtcctattcagaaaaattcaacctgaaaagaacgcattggtatgactgaaagaataaaaagagggcggtataaccctctttttgaccagagcctttatttttgactgtttttcctcgatgtgctgaagtcgataaaagaggcattggagccgataaaattacttactaagacatacataaagaaaccattaaaagctccctgccggcatccgtaaaaaagaatggataatgagataagcaatacagccgtaagcaagtctgcagccagacctattttacggtgagactgaaaatatgctcttaatcttctggtgttgttcaaagcggacacctcttgatgctcatgtataagaaaataataccattgaaatatatgtaatatcaatgaatagggttggaacggaggggttcaaagttggggcgatcttgtgtaaaagaaaggatcaggatgaatgtgaccagcatccaccctgatcaatggggttcacagtgttctatttcattgtattccaatcggaataatattacaagggtgaaaaagaaataagcggaatgttttcggcttcttctgcttctagagcgggaaaaggaaagtgagatgtttgaatgaaaataaatgattatctgaaggaaaggtttccgactttaaaattagtgcccggcatttatcatcaatgggacgtgggaattcatttttctctcggcggcaatatgtatcaatttaatgaaagcggtgctttgaatcttgagtattttcagcttgtccatcatcaaaccgcagcacttttcaatgagctgtttgaacatagcgatgacttgtttcttgttgccaacgtgtataagcacaaaactcaaggtaatcacgcgagaaaattaaaggtttataagccgtttctgaagtgtaaggatgatttatatcggattcaagtgaagacctgtccatgcccggtcgaagaagaatatgaaatgcagcagttttctctattatgtaaacggaaagatctgcgtgttccccaattacttaaggcagccgtccacgaagattttccgctgaagccaaggttcgggggctgttccgttgggtatcctgatgttttctttgtgaatatgacaaaagatattattttctttctgtatgatgacagagggtgtgaagtcattgctcttgatgccggaagaatacgaaagctttatgatcaatatcacgattggattgaattggactgaaaatgaacacatgaattcgaatccgcttgtgccggctttgttcttgcctagtccggctgcatgagtataatgggcagaattgaaggacgccagaaacttttttttctctcataccgaccttctgcatgttaagcttctgtatttattttgaacgaattcctatttgtaaaacggctgaatagaataacataaaagctttttttacacagtgcaggaggagagaaatgtgagggctgaacaccgtgattgtatggaaattggaatttattcatttgcagaattatatcccgatcctctgacagggaaaacagtcagcgcaaagcagcggatagatgaattgatgaagctggcgaaactggctgacgacgcagggcttgatgtattcggtgtaggcgagcatcatcgtcttgattatgcggtatcttcgccgccggccatcttatcagcgatttcacagatcactgaaaatattaagctgaccagtgccacgactgtattatccaccgcagatcccgtccgtttatttgaggattttgcaacgcttgatctgatttcagacggccgggcggaaatcattgcgggacggggcgcatttttagactcgtttcctcttttcggttatgacgtaggccattataaagaactgtttgaagaacacattgacctttttttaaaattaaattccggggaagaatcggttacctggaaaggacgttaccggccgccgctgcgcgaggcagaaatttctcctcggccttttcgcggaagcattccgctatggttaggtgtttcggggactccggaaagcgcagaacgggccgggcgtgcaggtgcggggttggcattagctgtactgagcggtgatccgatgttatctaagccgcttgttgacaaataccgggaagcggcttctaaagccggtcatcctccggaaaatgtgaaggttgccgtaaccggacatatgttcatttcaaaaacgaatgaacaggcaatacaagaattttatccgtatcattcaaattactggtctcacgttcattcatatcacgggatcgatgagcctttaacgaaggaagactttgagcgggcgtccggaaaagaaacagctttatttgtgggaagctcacagcagatcattgaaaaaatcatgcatcaatacgagttattcggacatcagcgatttctcgcgcaaatcgatataggaggtatgccatttaaaaaagccgcggaaaacatcgaacgattagcagcggaagtagcaccggttatccgaaaagaaaccggcaaatccagcgaatgaagttctgagcaaaaggggcgggccggtcaatcgcggattcgacaacagaatcggcccggctttttctttatgattataaaaaacaaagggaaaagcgccaacctcattgctttttcctatcaagaaaaggaaggtcatttcaacctctatcgtgaagtgtatacaccgaaaggtttttattaacaaaagagggaggatgatgcagtaatgaagggtttagtcaaagctgcagttttaactgttactcttggtattggaggcgctttctattcaagtggtgcatctgcgcacgggtatataaaagagcccgtcagcagagcgtacatgggagcattagagaaacaaacattgggctggacggccgctgcgcagaaatatggctccgtcattgataatcctcagtctgtagaagggccgaaaggatttccggctgctggtccgccggatggaagaattgcgtctgcaaatgggggatcgggacaaattgacttcggtttagacaagcagactgcagattattgggtaaaacaaaacatccgcggcggttttaacacctttacttggtactacacggcccctcatgcgacatcaaagtggcactattatatcaccaagaaaaactggaatccgaataaacctttgtcaagagatgaattcgaattaatcggaacggtaaaccacgacggttccaaggcagatacgaatctgactcataagatttttgtgccgactgatcgaagcgggtatcatgtcattttaggggtatgggacgttgcggatacttccaatgccttctataacgtcatcgatgtaaaccttacacaataatctatgaattactgatcggctgcatgttgatacatcggccgatctttttagttttaatgtgtgaaagaaaaggggaaaaacagcagagcgccataaacatttcatttatggcgccgtacgatcatggaggtgctgctgacatggatgcggaggtaagaggattcttaataaccgccgaggaaagaagccccaacgatgattaataaaatgaatagcaccacgattaacgcaaaggagctaccataaccacctgagaatcccatataatctcacctcctaaagaggattaatacatattatgccgaaatgaaaagtttgatagggatgctagtttactttttgaaaaaagtttttttagtctatatttcctttacatgaccatccgttaaaatgagtaaaaggaggcatcgtactgcttcctgtaatagaaacgggtaggctcatacattgagaagttgcgaagaggatgcgcagctggcttgttttttaaaaaatgaaaatgtaacacgctattaggattggaaccttttgattcaacggaacaggctgaagaaatgattggttggtttcaagagcagtatcatgaaaaaagggaatgtgatggggaatcgagaaaaaagatgcgaagggcataatcggaaccatgtatcaaaacggattgcctgatgatacacgcgtatactccattccgaatgggaacgttaacgatctaaatagaagaacttcaagtgttctgcggtaaataaaaaaagccgatgaaggcttaacatggattagacgctgtaaagcatttttttgctgtgctttctgcagacggagtttgattgtaagaaacgattccgataatcactaacaagatgatgaacaccaatatgctccacaacactatttttaaagactttgacatggtataccctcactttgaaagactttaccggggctgcgatcggagcccgcacttcaagtatagtcgttataacggtgaaaaatgtgcagtccagttaaaaaaaaacttgcgggcgctgccgcaagttttctccgtattaaggtctgtggaattcaatatgctgattatcacgatcgaaccaccctctgaatgcccaattgatccagcccccgtctcctttgttatcgaaggacccgtcttcgaagacccagattccgtaagtaataccgtcataaacggctgatccgtaaaactgaacgccgttaaagcggtcttcatattcttgatttaaattgaacaccatgacgttgtacttctgtcctgatgcgtaaaatgttgtttccatgacattttttacccagccggttcggttttgatctgacttaaccgcttcagcaatgcgatctgaaattccgagaacatctacgtttacgttcagcccggcatcaacacctgctgcttttacgttttggtctgctgtttgggataatttactttctaacggatttgcaacgggtgaaacgtgaggcgcgtttgcgtgttcagactgactggctgctgaggcactggctgtgaaaggaattgttagagataaagctaagcatgatccgactatcgttctggcgattttcatggctatgacctcctgaggaaatttttaaaaattgttgcaaattcatggtatcgcagaaaaattgaccaagcaaagagtagattatctcaaaaatcatgtcattctatttgtgttgttttctgtaaatgaaatacttttcattaggcgaaaagggaagaaaataatagagtctttttatgtattgtgataggatgaccggattttgggtgaaaatagcccggagaaacgccataataagaaaaacacccggagtttaccgggtgtaaaaagtgttgatatgtcaagttagcagcattttttacattttttgcattttcttttataaacaacgatgtaatcataatcaagatgctttttatcttgtttcttctttttttgtttaggctgctttgggtggtgatcataatgtccgttcatatccatatccatatccatatccatatccatatccatgtccatatccatatccatatccatactcatattcctccttttttcatctgacggtagtattctatgacagaaagcatgaatggcttggacaaatgaaacggtatgctgaaaaagaggcatctcattcggtataaaaaacaggatcatacccgcccgatagaaaagagaggagatgatcctgatattgagatcctatttgataaccgcaattgcaatgccgtaccctttttcagaactgtataaggctgtcagtttcaataccttccagccttccgcggctttagtcccgattccgttatgagccgtgatataatctcccgggctgaccgtactgtcgacccgtacgtaatgccggccgttgagtccgacaatgtgccattcgtctctggccgctcgtgcttcatagtcagcttcaagagccggactgcagtctgggttttgtttcggcacgcgtaccgtttctcctgtttcctcgtcagtcacattttcgtatatgaaaccgccgaactcgtttgtcaaaaagcggctttgccatccgaagcttgctgctcctgagataaaagcggctgtttctgaaatgacgccgagcatgtaatctccgacgtgagccgattcaattttttcgcctttcactgtgacgattgtcccggcgggaattgtctggccggttacactttcaaaatattctccgtaccctgacagggaagaggtgacagctccggcgaacgtaccgtggccgcccgctgaatccaatttccatttgatggactgatgccctccggcaaccgtgtatggttcttccaatgtaatgctttctgatgacagaatcgttctggagactttgctgcccgtaatatggacattgtttgaagcggcgataaatgcccttgaaccttcagaacttgaacctccggaagagctgatgatcgcatttctgtcacctctggctgtaatatcgcctgttcccgcaataacggcgcttgtcgggttgaatgcaaaaccggagctggtcgcgagctgtgcgcctccctttaaattgacggggatctgctcataagtctgtccttttatagatgcggccgcgctgtaaccttccgcttgcaccccgagaatgacggcctgactgttaggggacgtaattccgacggaaccgccgtctccgatcatcgtaccgttcataatatttacgttatattggcctccgccgattgagatgcctttaggagatgacttgtatatatcaaaatttaaaattttaacataatcggttttatttgatccgccggatatattgatgtcaacacctgcttgtgtaaagccgcgtattttaatgccgttgatcgtgatattttgactgcggtattgaagagccactactggattcccgccatagtcgtatgagggatcaccaatagctgtgaatccgtttacattaacgtttttataggcagagatgaccagcgccctcggggtcacaccgtcatagagagcattgaataccggttcaatcgcggtgcaatcggttaaagtaacatcataagccgtcgtgctttcggggtctgaggcctgatgatggccgatatgacgaatatcaaatgaacgtacatcacgatacgaaacatgaccgataatatgaacattttgagaagccggccacaggctgtgcgcctttacctcaatcccgcggatatttccgctcgtatagttatttaaaagccatacatgtttagagccgtcgtcaatttcaatgccgttcgagtttgcgctgccctcagcatgctctgtgccgcgggggtttccggaatggcagttggagatgaaaatatactcgctgtaatgggtggtaatgccgtcgtctccggcgccgtatgccacacagttatcaatccatatatatcggcagccgtctttcgtccattctgtttcaggcaaatgatcgtaagtcggagatgtaatatcaataccatggagacccgcgttaaccgtttcaacattcttaatccagccgtattgcacattagcaaacgttaaacagctggaaaactgtcctccggggttcctgaccccgcattgacgatcaggattccagtctaaagtcatgttttccacaaaaatattacggtttccattttcgtaatcatcgttagtaatgacccattcgaatgcgggagtgtcctcatgaagcttaagcacggtaatcccttgtccctcaccggaaatggtagtccatgaggggagttttatcccttgaaccaaaaattctcctgcgggaacatttactttgacccggccgttcccgatcgctctccgaaaagcttctgtattgtcccggccgtcagggaccgctccgtagtcctccacattcacttcccgggtgattttattcataagcatttcgtattctgtatcaagccgttcttttaaaagtgaggtgaccattccttccgccgtcacccgggcatctgcgatctcaagattatcatccgttgcggaatgcttaataaaattctgcatccttgctttgagatgctccaattcagagggctgtgcagggcgagactgcaatggggcgtttaaagacggatcaggaaagtttttaaattgaaccattctaaagacacctctttcttttgatataagcgcctgaggcaggggacagaaaagagtcgtgcgtcctttaagcgcttattcttcaaattctttattcagaacgaaattccttttgaaaccaaggtgaaattttaaaaaagctctgttgaaagaacggatataaagctttgtattattgtaattgaagctgtcatgtgaaaatggaggaaaaactgataggaggggccctcattttaggtttattctcattggcttcgcagtgcttcctcttcggctgtatatacaccaaaatcaacattcttatcagttaaatggtataatggggcacggattggtcatcaatacgactgaaatagggaagcaaaaggagcagcgaacatgactttacaaatcaaaattaaatattcagatgatacgcaaacgagaatcaataaaattgaacagggcgattggattgatttgcgggcagctgaagatataacaatcaaaaaaggtgaattcaaacttatcccgcttggagttgcgatggaactgccggaaggatatgaggcccatgtcgttccgcgttcaagtacatataagcatttcggtatcattcagacaaattcaatgggagtcattgatgaatcttataaaggcgacaatgacttctggttttttcctgcattcgcgcttcgggataccgacatttccaagggggagcggatctgccaattcagaatcatgaagaaaatgcctgaagtggagctgatcgaagtagacaagctcgggaacaatgaccgcggcggactgggatcaacaggcacgaaataaaacgaaaaaagactgcttaacagcagtcttttttttatggaaacagcagttacattcaatttgtttcggggattcttgaattgggaaatcatacgtcacgttcgaatttgacttcgaaataagcggccgctccgtaaccgtctatgccggagcaaatatttgagccggacgccagcccagctcagcatattgataaaatgatttccctgcagtcctcactctcctccaaaactggagaagggtttcatttttatcatttaagccttccgtctctttgaacagaaagacttttttaggttaaaggatagaagttgttttgatgtttttattcttcaagatgaacggaggttttgtccaacgtatataatattgtgacaaaagtgtaaacaaaagaaaggatgatgttatggcaaaaagggttaggagagtagaccgtaaagcagctggcaaagaggcagagcagaagaaaccgtccaaagtcaccctgttctgccgttcgcttcaaaggctgaagcatttgtattgtaacataaacatacaaatgccatcaataaccaaaaaaggaattttagttttaattttaccgtttttgcttctgccgttctttcgggctgatgccgcttcagatatttacggcagtttcgaggaattaaagctgaatgaaaatccttccgatttttccatttcaacgcgagagcatgacccctctgtcctcatattagctatacacggcggaggcatagagccggggaccagtgagttagccagagaaattgctgaaaaccggagtttatatttatttgaagggttaaaatcagccggtaatgcggctctgcatttgacaagttcgcatttcgatgaacctaaggccgtgcaaatggtgaaagagcactctcatgtcatttcattgcacggttacggcagtgacgataaaaagataaaaatcggcggtacggacagagaacgggccgaacttttgaccgatgtgctgaaacggcacgggtatcctgccgttcttcttggcataaatgataaatatgcaggcgtcagtccgaacaaccttgccaatcaatcttcatccggattgagtattcaaatcgaaatgagcaccggcttcagaaaatcactatttgacacttttacgctgaaaagcagagcatccacacaaaatgggaccttttatcaattcacaaaaacgatttctgattttatcagtgacaattattaataagcacgcctattttgtcggcggggctttttcttttgaaatttatgaaactttaagttcttaagatcgtatacataattgacaggatgaaagaaaagaggtgggcaaatgaaagtgatgatcgggtctatcattcttcttgtcatcatcggattcggtttatggctgatgcttagtccaatctttaaacaagtgggaagcggagccaaaaaattcaaaaagtcatgggaggaagaagatcagcatgagcgaaaataagcgcggaaacacaaaaaaaattatcggcggtgtgattataggtgcagcccttttaattgcgggcgttacagcgtcactattcattgaaaaaataccgaatggttatgtcggggttgtatactcaccgaatggcggggtaaaatccgacacattggaccaaggctggcacttagtcggattatttaataaagtaacggaatatccggtgcgtatgcagacagtgaataatgaaaatataaaagtggcaacctcagacggtaaaaatatagaaatggatatcgcttacaactatgtcgtgcagcctgataaagtagtcgatctgtttaacaaattcggagcggtagacgttgaaacgattgaaaatacatatttaaaaacaaggctgtgggatgcggcgcgaaaatcaatcagcaaatactcggttattgacacatacgggcaaaaatctgcagaagccgctgccgatgtgcaaaagagatttgctgatgatatgaagagtcttggatttttaattgatgatctgacgcttggcgtaccgaagccggataaagccacacaggaagccatcgatgcaagggtgaagtcttcacaggaacttgaacggacacaaactgaaattaaaatagccgaagccgaagcgaaaaagaaaaaaattgaagcggaagggatcgctgattacaaccaaatcataaagaaatcaatgtcagatgaaatgatcaaatataaatggattgaaaaatgggacggaaaaacgccgaaagcgacaggcacagactcactgctgcagctgcccctggacgatcagaagcaaaaataaaaagagaaggaggcgattgcctcctttttatgttttttcctgtgggtctttttccggcactaattcttcagacgcctcggtttgatagctccatagcgtgctatccgtctctgttgtgtcctgataatcttcgggaagtacatattgctgcaaataccggtgaaaaaatgcctcaaaaacagaaatgcaaagtgcagagataactgatgccgcggcaggagagacattaaatccgccaatgttcataaggaatatccataatataatgaaagaaattccgaaatcagctgcaacggctgtgaaattgcttgttctcggcagaatcatgcaatcacccgcaaaataagtgattaaacttaagatcactgtaataaacagaacgtttaaaaaggttacttggtacataagatccaaaacaatgtacagtaaagcaagtgtgagcgccgttttagaagcgaaagcaattacgtgtttcatttgaaccaccttcgttatttcgtttagtcttcattgtaagcaatccgcaaatttttaaactggtatatagtggttataaagtatacgttttaataaaatgtgtatagacatcacaggattcgcaagttaaaatatgtaaaaagggggatgcaaatgaaaaaatactggatatgtattgctgtttttttattatgttttagcggaatacactcagctgaagcggctaccactgaattcggatcaaaaacaagcttcactttggagggaaatgcaaaagagtttcatattgaaaatccgggggctgtagctgccgacgattactatttaggatataagttcaccataatgaacaactcttcgtgcggtttaagcatgaaactccagcggatggcgctgaacgggaatttttatacattaagttctaaaacctacagcggcagctggttaaacctcagtgcccaggataaaaaatcaattgatccgtatcacaaatacagaattctggttgaaagttcttcaaacgtctgtggccccgtctatattaaagggttttacggtgtagaatattatcattttgattgaaaatagatactcgctaaaggcagcgggtttttttatatttaaatataacttattgtactatgtactaaatattcatacataaattttaatgcacccgtccaaagaaaacataaacaaaagtaaattcatcacgcacaaatatacaaagttgaaaaacgaatgaaaagtttcctgagggaaacattattagttgacttcaaaagtgtgatgtcggataataaggatgtaagtttttcctccttagcagattcgtttcttaagccagggcgaatctgctttttttatgcaaaaaaaccccttacagaggggttttttacgataaatgaagtttaatagaattaatgtacggctctgaatacgccgataactttccccaaaatgcttacgttttgcaggataatcggctccatcgtcggattttccggctgcagccgcacataattgtcttctttatagaagcgcttgaccgtcgcttcatcatcttcggtcatagctacgacgatttctccgttattggccgtgttctgctgtttgacaatgacgtaatctttgtcaaaaatgccggcgtcgatcatactttctcccatgatttctaacataaagacatgttcgcccggaggaaccatccggtcaggaagcggaaaatactcgtcgatattttcaacagccgtaatcggaatacccgccgtcactttcccgatgaccggaacgtttacgacctggcttttcggaatgtggacttcttcttcatccaatatctcaatcgccctcggtttagttgggtcccgtctgatcaggccttttgtctccagccgcgccaaatggccgtgcacggttgaactggaagccagtcctactgcttctcctatctctcttacagaaggcggatatcctttcgtttttacctcttctttaataaaacgcaggatatcaagctgcctttttgatagcttcgtcatatttcgcacctcaaaacgtcgattttaagtagattatagcatgattttcctgacagtacaaacataggttcgaaaaaaacgattgacagaaacgtttgttcgtatatactgaaaggtataaaaagcgaacaaacattcttatcggaggttgtttacatggcgaaagaatctattatatttgtcgggctgtttactgcgattttaagtgccgctattttacttgtctcatgtgcgggaaatgatcagtccctaagccaatatgttaaaataaaggttcaggacggcgatacactctggtcacttgcggatcatgtagcagaaaagaaacacattaataaagaagatttcattgagtgggtgacggagaataatcatctccaaactgctgatataaagcccggagacgaacttattcttccggttaagaaaaagcatccggccgtatatcagctggccattgtcaattagagaggaaagagagaaatgaaggcgctcatttatgcccgcgtaagcacaaacaaagaacagcagcaaacgtcattaaaaagacagaaagaggagctcagtgagatcgctgctgcaaacggcatggaagtcgtgaaagtcatttctgagaaagccagcggttacgaaatggaccgcgacggagtatttgaaatgcttgatgaaattaaaaaatcacatattgacgcgatattggtgcaggacgaaacgagattgggaagaggaaacgccaagattgcgcttttgcattgcatttacagggagaacgtaaaaatatatacgacggctcataaaggtgaactggagctttccgaagctgattcgatggtactcgaaatcgtcagtatagttgaggaatatcaaaggaaaattcacaatatgaaaatccggcggggaatgaaaagagccgtgaaaaacggctacaaacctgaacggaatctgaaaaacagacatgaaaacagcggaaaagaaaaaaaagaggttccggtttcggaaattatcaggctgagagccaacaagcttacctttgcagaaatcgcagcgaccttaaggggattcggctacgatgtgtccaaagccacggttcaccggcggtttcaggaatataccgcagacacagaaggcagctgacgcgcatcagttgtaaaaaagactgcgttttagtagtatataatcaacacgcaccaaaggagcttattatgatttctaaagaaaaaatcgcaagaattaacgaattggctcaaaaagctaaatcaaacacgataacggatgaggaaaaagctgaacagcaaaagcttcgccaggagtatttgaaaggattccgctcctcaatgaaaaatacgttaaagagcgtaaaagtgattgatccggaaggcaacgatgtcacccctgaaaaactaaaaagagaacaacagaaaaataatcttcattaaacagaaagaatacggcaatacgtattcttttttcgtatatactaatatcaggatgtgctttacgacaattttcaacaagtttatctcaaatttaagctgaaagagttgagaaaaagtcagcatcgctttatgatgaaaaggtacaacaataaggaaggggattataatggatacaattgaaaagaaatcagttgccaccattcgtacactatctatagacgcaattgaaaaagcgaattccggacatccgggcatgccgatgggagccgctccgatggcatatacgctgtggacgaaatttatgaatgtaaacccgcagaatccgggctggtttaaccgcgaccgctttgttttatcagcaggccacggttcaatgcttttatacagcatgctgcatttaagcggatatgacctcagcattgaagacttgaaacagttccgtcaatggggaagcaaaacaccgggacatccggagttcgggcatacagccggagtagacgctacgaccgggccgcttggacagggtattgcaatggcagtgggaatggcaattgcagaacgccatctggctgagacatataaccgtgattcattcaacgtagttgatcattatacatacagtatttgcggagacggcgatttaatggaaggcatttcttccgaagccgcttctcttgcaggccatcttgaattaggccgcctgatcgtattatacgattctaatgacatttccttagacggcgatttagaccgttctttctctgaaaatgtaaagcagcgttttgaagcaatgaactgggaagttctttatgttgaggacggaaacaacattgctgaattgacggctgcaattgaaaaagcgcgccagaatgataaaaaaccgacattgatcgaagtgaaaacgacaatcggtttcggttctccaaaccgcgcgggcacatccggcgttcacggcgctccgttaggacaagaagagagcaagctgacaaaagaagcgtatgcttggacgtttgaagaagatttttatgttccggaagaagtatacgggcatttcaataaagcggtaaaagaagccggctcgaaaaaagaacaggaatggaatgacctgttcgcggcttataaagaaaaatatcctgagcttgctgaacagctgtcactcggtatgaaaggcgagcttcctaaagactgggatcaggaagttcccgtttatgaaaaaggcagcagccttgcttcccgcgcatcttcaggtgaggtgctgaacggaatcgctaagaaaattcctttctttgtcgggggatctgctgaccttgcgggttcaaataaaacgacaatcaaaaatggaggagacttcacggccaaagactacgccgggaaaaacttctggttcggtgtccgtgaatttgcgatgggcgctgcattaaacggaatggcgcttcacggcggcctccgcgtattcggcggcacattctttgtgttctctgattatttaagacctgccattcgcctggcgtcattgatgggtcttcccgtcacttatgtattcacgcatgacagtattgccgtaggagaggacgggccgactcacgaaccgattgagcagcttgcttctttacgcgcacttcctaacctttctgtgatcagacctgctgacggaaatgaaaccgcagctgcatggaaggttgccgttcaaagccaagatcatccgacagctcttgtattgacacgccaaaacctgccgacgattgatcagcaggctgaagaagcgtatgcgggcgtggaaaaaggggcttatatcgtttccaaagcccaaacggaatcaccggccgctcttcttttagcgacaggttctgaagtcggacttgcgatcgaagctcaagcgaaactggctgaagaaaacattcacgtatctgtagtcagcatgccgagctgggaccgctttgaaaaacaatcggctgagtacaaaaacagcgtgcttcctccgaatgtgacgaaacgtcttgcgatcgaaatgggttcaagcttcggatggggtaaatttaccggtcttgaaggagacgttctcgcaattgaccgtttcggtgcttcagctccgggagaaacaattatgaaagaatacggatttactgcaggaaacgtggttgaccgcgtgaaaaaacttttaaacaaataacgagacaaaagaggatgagtcaaatcatcctctttttcctgtttatgcgacaaaaatagaaggagcggcgtaacagtaatagacaattctttcttttctccttttgtataatagaaagcaataacgaagcgctgtaaaaggggatgaggaaatggaacgtcattactatacgcacctgataaaggatgagtttgccaaccactacttcgggcgggaaacggctatgtttgagttgtttcgagactatcattggacagatctgacgccccaggaatatcaaatgacagaaaagcaagttcaatatataacggaaccgattccggtgatacatatgcatcagcgtctccagctgcatttaaaccgaatgagttacagccgtttggattccatttaccggcttacactgcctggagaaaagggccgcgccaccttcatgatgaaagacagtttaattgagattgcggcttcgggagattatgaggcggaaacgattttctttgagattctgcgtaaaatcagcccctgttttcttgcaatggatttcaagacacggcgctacgggtggttaaatccggtcagagaaagaaattttgtttaaaaacgaggaaaaagagatgtaaatgttgtataatagcctttggtttagtacactttaaactagacaacatgaaggaggaaataaaatgactttatgggttggcatcctagtgggcgttgtcgcattgctcataggtgttgcactcgggttttttattgctcgtaaatatatgatgagctatttgaaaaagaatccgcctattaatgaacaaatgttacgcatgatgatgatgcaaatgggaatgaaaccttctcaaaagaaaattaatcaaatgatgaaagccatgaataatcaagcgaaataatacgtacagattatgatatagagatacatggttataaaaataaaaaacccggagagggttttttattttggcgtcatgtttcaccccaactgccggtgtgcagttctttttggtattgtatgagaaggtggtcaagctcctggctgagttctatcgtaatgtttgatgtcattccgtttgtcatgacgattttaagcagctctgcccgttttttttcaatttcatttaatagatgctctctaatcacagggatatatcctttcatacataaatctttcacctgagtcgctattattatatccacatttatactgtttttcaaataagaaggagtataatatctcgatgtcaaattaaattatataagctttttctataaaaagtaatccttctcggaaaagtgttaaaaaaatgaaatgattttgtcataactcgaagggagtgtgtcatcgtgagttttaattactttctgacgtttggggccggatttctgtctttcatttctccatgctgtctgccgttgtaccccgcctttttatcttacataactggtgtcagtatggacgaggtgaaaacagaaaaggtgatgctgcaaaagcgtggcctcgtgcatacactttgttttttgcttggtttctccgtgatttttatcgcattgggatatggaacttcgtttatcggcagtttttttacccaatatcatgaagcgatccgccagtttggcgctatcatgctgatccttttcgggctgattactgccggtgtgtttcagccgaaattcatgatgaaagagcggcgcattcactttaagcgccgtccggaggggtttatcggttcggttctgatcggtcttgcgtttgcagccggctggtcgccgtgcagcgggcccattttaggggccgtgttttcgctggccaatacaaatccttcttcagcagtgccgtatatgtttttatatgttctcggatttgcgattccttttcttgttctttcattttttattaccagaatgaattggattcgcaagcatcagctgcttatcatgaaaatcggcggcattcttatgattctgatcggagttatgctgttttttaactggatgagctacattctgatcgttctgtcaaatcttttcggaggatttacgggtctgtaacggattaataacttttgaactattatatacccttttgtttttggtacaataagactagttaatgttaaatatgtggaggggaatatgacacgagttttagttgtagatgacgccaagttcatgagggtgaaaatcagagagattctggaatcggcgaattatacagttgccggggaagcggctgacggtgaggaagccctggcagtatatcaaaaaatccgtcccgacctggtgacaatggatattaccatgccggtcaaaaacggtatacaggccctgcaggatattttagcttttgacccgaaagcccggatcatcatgtgcaccgccatgcggcagcagcggatcgttctggaagcgattgaattaggcgctaaagactttatcgttaaaccgtttgaagcatctaaagtgctggaggccgtaggccgggtaacgggaacgtaaacgtgttctcttttcaaattggttttttttatgtttttggagtatagtatatagtatcaaactccgtgcaagcaaaggaatgataaagatgatgattataatttcatccgttattgcagcggccatggcaatttccgtgatgatcgtcaggattaaatcctccgacaagcccgcttcacctaaaaaaataattctcccgccgattttcatgagtacgggagcgcttatgttcctttttccgattttcagagtgacgggcgaagaatttttggaggccattacgctgggcgtgatcttctctatttttctgattaaaacatctaaatttgagattaaaaataatgaaatctatttaaaacggtcaaaagcgtttgtgtttatcctgattggtctcttggttatcagaatcgctatgaaatccattttgagcacgacgattgattacggagctttaagcggaatgttttggattctggctttcggaatgattgtcccgtggcgcatcgcgatgtttttgtcttaccgcaaactttcgaatgaactgaagaccgctgatattcagatgaattaaaacctttccgtacgccggaaaggttttttatttgagcagggcttgataaggagtaagatcaatctgtttttcacggagatgcttttttaaaaattgatgatcacgcttaggagtggccagtatgtaacccctgatgattaaatcacgatttatttgttcagcttcctccgctaaggaaagttcaccgatttttccggcgattttcgctttggctacatcccgaaagagctccggcacgggggcgaccaattcatccaaaaacgccttgtcaccctcattccataagtgcctgcttttttcaatataatagtcctgccaatccagttctgaccggccgtcttctttcggtaagcgttttaaaaattttcgaaacataaaaaacccgccgatagacagcaatccgatcatcacgatgacccaaaataaaataaaccacataaaccagccttccagcattgttctatctcctccttactttaaccatattgtaaacgaagacagaatagaagaacacatgaaaaaaagaatagaaaaaatgatagatgtccagtcattccggttggtagaacatattctatcgtatagtgattctgctatttggccatgggagattcactttgagggtatatgactgatatgaccggacaaaaaagccgcttccattgagggatgaaagcggcttttttatgttatagaggaaattgaaaggaaaatgaggcaggagtctcatttggctccttgttcatggagacggtcagaatatggttggtgaaatcagtgaaaatatgtttgtcattcagataaaaaggaagcaccatttgtttgtttaacgtccgttcaagcgttttaacagagagcataaattcattccccgaaagagtgacggttatcgcttgcacctgcttcagcgccgtcaggtcggcttcaatgatatattgacggcttgtttcatatagatcgatcggcagcgtctcgtcataccaagcatacgggtcctcgtaaaactgccgcagccattcttccgtatcatcaaattcttcagcgttttttgagtgattcatggaagcatccctccatattaaaaagccttgctataacgtatgcagaagctttgaatgggtgaatggcacaaaaaaacagacacggggtctgttttacatatcgtggcttgtattatgtttttgtcttgtatggttgcggttttttacttttttgcttccgctcagcggttccggctggccggggttatggcccttcggagcatttttatgcatatctttactcgtatttttatttgtcatgttaatgcctcctttttaaggtgttccggctattggtttgtttttctttttttattgttctgccgttcttcttccgtcaggacgagctggtcattttctatataacccgcgcctttgccttggcttttcgcatcattcatgccgttaatgacatgattggctttccgttttaccatgatcatcacctcaacattaatatggctctttacagcccgttgtatgaggcggaaaatcggacaaaatttaccgaaaatcatgctgataagacgatcttattgtatttaataaaaacattgatatttacttatgtatgattttatactaagatgaaattgtgagaaaattgtgatggaatgtgaacattcatctaaagaacgatcttgatcattgaagggggattttggagaatgacaaatcagcaaaaagtcgcaacacaagacgttttccaagcaagaaaaacattttcttcaaatgggaaaacatacaactactattcattaaaagcattggaagacgcaggggtcggcaatgtttcaaaacttccttattctattaaggttcttttggaatccgttttgcgtcaggtagacggacgcgtcattacaaaagagcatgttgaaaatttagcaagatggggtactgctgaattaaaagatatcgatgtgccgtttaaaccgtcacgggttattctacaggactttaccggcgttccggccgtagttgacctggcatctttaagaaaagccatggcttctgtcggcggagaccctgataaaatcaatcctgaaattccggttgacctggtcattgaccactccgtacaagtcgacaaagccggtacggaagacgcgttagccattaatatggacttagaattcgaaagaaatgcagaacgttataaatttttaagctgggcaaagaaagcgtttaacaattatcaggccgttccgcctgcaacaggtatcgttcaccaggtaaaccttgagtttttggcaagtgtcgttcatacgaaagaggaagacggagaacttgtgacatatcctgatactttggtgggaacagattcccatacaacaatgattaacggaatcggcgtcctcggctggggtgtcggcggtattgaggcggaagcgggaatgctcggccagccttcatatttccctgttcctgaggtcatcggcgcgaaacttgtcggaaaattgcctaacggaacgacggcgactgacttggcgctgaaagtcactcaagtgctgcgcgaaaaaggcgtagtcaataaatttgttgaattcttcggtcctggtgttgctgagcttccgcttgcggatcgggcgactattgccaatatggcgccggaatacggagcgacttgcggattcttcccggttgacgaggaagcactttcttacctgcgtctgaccggccgtgaagaagagcagatcgatattgtggaagcatactgccgcaacaacggtttattctatacgcctgacgcggaagagccgatttttacagacgttgtggaaattgatctgtcaaaaattgaagcgaacctatcaggaccgaaacgtccgcaggatttaatcccgctttccgttatgcaggaaacgtttaaaaaacatctagtcagcccggccggcaaccaaggattcggagcggatgctgatgaagagaacaaagaaatttcatttaaacttaacagcggcgaagatgcggttatgaaaacaggggcgattgcaatcgccgctattacaagctgtacgaatacatcaaacccttatgtattaatcggtgccggattggtagccaaaaaagcggtagaattaggcttgaaagtgccgaattatgttaaaacatcacttgcaccggggtctaaggttgttactggatacttagtcaactccggcctgcttccttacatgaaggagctcggatttaacctcgtagggtatggctgtacgacatgtatcgggaactccggcccgctttctccagagattgaagaagcggttgctaaaaatgatctcttgatcacttctgtcttgtcaggtaacagaaactttgaaggccggatccatccgcttgtcaaaggaaactaccttgcgtcacctccgcttgttgtcgcatacgcattagcaggcactgtgaatatcaacctgaaaacggatccgatcggtgtcggaaatgacggacaaaatgtttatttcgatgacatctggccgtccatggatgaaatcaattctctcgtcaaacagactgttacgccggaattattccgcaaagagtatgaaacggtatttgacgacaaccagcgctggaacgaaatcgaaacgacggatgaagcgctgtacaagtgggatcaggattccacttacattcaaaacccgccgttctttgaggaaatgtctgtagagccgggaaaagttgagcctttaagaggacttcgcgttgtcggcaaattcggcgattctgtgacgactgaccacatttctccggccggagcgatcggaaaagacacaccggcgggcaaatacctgcaggaaaaaggcgtttctcctcgtgactttaactcttacggctcacgccgcggaaaccatgaagtcatgatgagaggaacattcgccaatatccgcattaaaaaccaaatcgcaccgggtacagaaggcggatacacaacacattggcctaccggggaagtgacatctatttatgatgcctgcatgcggtataaagatgataaaacgggtcttgtcgtcctggccggaaaagattacggaatgggctcttcacgtgactgggctgcaaaaggaacaaacctgctcggcatcagaacagtcattgccgaaagctttgaaagaattcacagaagcaacctcgtcttcatgggtgtgctgccgcttcagttcaaacagggtgaaaacgcggatacactcggcttaaccggtaaggaagtcatcgaggtggatgttgatgaatctgtacgtccgcgcgacttgctgactgtcagagcaatcagtgaagacggtaaggtaaaaacatttgaagttgttgtccgttttgacagtgaagtggaaattgattactatcgccacggcggcattttacaaatggtgcttcgcgataaaatgaaacagtagcagtatgaacaaaggagagaaagcagtctgctttctctctttttatgcgggaggccttgagatgcttgcgaaatggctgggcggaatgttacttatcgggttgttagtgtatgcgggctggaacatttattctgtacaaaaaagtccgaaagaagggacggaagaagggatgaaagcccctgactttacactttatacattgtcaggaaaaagtatctccctttctgattataaaggaaaaaaagtgctcctcaatttctgggcgacgtggtgcaagccgtgccgaatggaaatgcccgatatgcaggagctgcagaaagaatatcctgatattgcggtagcagccgttaattttacatcctctgaaaaaaatatacaggatgtgaaatcatttgctgatcattatcagctgacctttcctattctgattgacaaaagcggaattaacggagatttcaacgtgctttcttatccgacaacatacatattagacgaaaaaggaaccattcagcatattcgcgtaggcacgatgacaaaaaaagaaatgaaagaaaaactggatctcaaatagaggttcagtttttttattgtgaagggcttaggttttgaaaaattggaaaaaatgaatgaaaacacggaggtgagaagattgaaaaaaatgcgaaaacgttcttttcatgaattggttatggaaaataaacgtgagctgatgaccaatacggaatatttgaatcagcttgaagaaaagctggagcagcggttcaaacaaaaataacctttaatttgcagtcatgtttgcacctccttttgcaaaatatactcttaaggagggatgaacatgggcataaacaagaaagacggccagccgcaatacgctccgagccacttagggacaaaacccgttaaatataaacgcaacaaaggggaaaagtttcatgacaagtcaaacggacatccgattgtcatgcagacgaaaggcgaataacatcatatcaaaggagagcagacattatgacaaacaattatcaaaaaccgaatccggatgaccgttccgataacgttgaaaagctgcaggatatggtgcagaataccattgaaaatatagaagaagccaaagaatcaatggaatttgcgacagatgaggaaaaacagcgcattcaagagaagaatgccagacgcaatgaaagcattgaatcgttccgcagtgaaatccaggatgaatcggctgcaagagaaaacggctatcaatcataataaaaaccagggaaacctggtttttttctctttccggctcgttgtgataaaatggggctaatctgataataagggagcagagaacgttgcatgtgtcaaaaaaagaaatagaagtgcgttatgcggaaacagatcaaatgggtatcgtctatcatgccaattacttagtctggatggaggtcggcagaacggcgctgattaaggaactcggattcctttacaaggatatggaagatagaggagtgctgtcccctgtattggatatcagcatttcttataaaaagccgctccgctacggagaaacggctgtcgtacatacttggattgaagaatataacggatttaaaaccgtttacggctaccacatctataatccggatcaagaacttgccatcacagcgacatcctctcatatatgcgttgataaagagagcttcaaaccgattcagtttcgcaaggcttttcctgattggcatgccgcttacgaaaaggcaaaaaaataaggagcggctgcagttatggcatttggaattacgcgtaaggaactggaaagatggaagcgggatgtatcggaagggaaaatcgcttttttaacgcattactggctggacgaccgctttccggaggctaagaccgtgacgaaggccggttcaagcgatctcaataaactgatcagatggggagcggaatacgggctgaagccggagtggattcaccataaaaatgaatttccccactttgacctgctcggtgatacgcaaagaagcatattagaaaaagaacatctgactgatcatctcaaaaggttcaggctgtaaaaaaaagaacgcatccgctgcgttctttttttcttacacgtaatcaaataccggctcttctgcctgatctgaatatgtgactgacaaatcgtgattatcaaagtaccataagtcgctttcttcaataaaaaaggtaatgccttcaacttccgtgctggtgccgatgttcatcggccggtcttttaaaatgccgagagaaaagcctttctgaacgttgctgcatcccccgtaacggacaaagaaacggacatggtcgcctgtttccagatcgagctcttctttgtaccaatccagcgcgcctttcgttactttcatgttcatccggaacactccctttttgtttctcatataaagaaattatctctattataaacgcatatggcattttgatgtcaaaattgaagtttcatcaaaaccatttgatcttcggttctgttttgtttataatccgtttgatgtttgccctgtgtctgtagataacaaacgcggtcaagagcgtcactacgactaataaataagggtcttttacaaacagacagtaaataatcgtataaatccctgttaacattgaagacagagaaacaaatttcgtaaggaataaaaatacgaaaaatactgcaaccatcgtaacgaataacagcggagcataaaacagcaggacgccccctgatgtggctacggctttgcctcccttaaactttgcgaacacggggaatacatggccgattactgctgccacccctgcgagaagaggatgaatggggacgtgcagtaaatatgggagcgccgcggccaaggtgccttttaaaatatcggctgcgatgacaacagatcccgctttaacgccaagcgtgcgaaaagcatttgtagcgcccaaattgccgcttccgtgttctctaatatcgatccctttcgcaagtttgcctacgattaaacctgacgggatgctgcctattacataggccaaaataatcaataaagcaatcaacatctacatttctccttttcaatgtcccttcactctattttaacacgagttgttaccgtctgatgacaagttttttgagaattaagctgacaaagcgctttttttgattccggcgaagcggtcatgtacaatatatcaaaaggagatggtaaagatgcaaaatccttcaaaatcagagattaaagaaatcctggaccggagcaaacggatcgcagtcgtcgggctgtcagaccgtcccgaccggacttcttacatggtttccaaagcgatgcaggatgaagggtatgaaattattcccgtcaatccaacgattgatgaggcgcttggcgttaaagccgtcgcttcattaaaagacgtggagggaccgattgatatcgtgaatgtgttcagacgctctgagcagcttcccggcgtcgctgaagaatttttacagacggacgctcccgttttttgggcgcagcagggccttgcaaatgaagaagcgtatcgcatgattacagacaaaggacggacggctgttatggatttatgtataaaagtcgcccgcgctgttataaaataggaacaaaaaaggcaaaaatccttggcaaatcaggggtttttgcttttttattgaaagaatactctttgcgtatgatgatgaaacagatacaataaagcatgaacagcttttttagaaacccctttatacaggggtttacagtctgtttgcgatggccggcataaagctatataatagaaagcgaactcatgttcttattcgctgaaaagggcaccagaaagatgaaaagccgttcgaatgtatgtcttgcggcctaaaaaacgagccattcgcttaaatatgttgcgaaatcaagcatattggttataattgtgagtccgaggagaattggaccgaagcttgcgcatactgaaaaacaaagacatgaaaacatttaaaaaagagaatgattaagagcaggttttttgaaaggggtttgtacgtttggctagaaaacagcaatttgattacaacgaagatgccatacaggtgcttgaaggcctggaagccgtcagaaaacgaccgggaatgtacatcggttcgacggacgcacgcggcctgcaccatctggtatatgagatcgtcgacaattccgtcgatgaagttcttgccggctacggagatcatattatcgtaacgatacataaggacaacagcatctccgtacaggacagaggacgcggaatgccgaccgggatgcataagctcggaaagccgacgccggaagttattttcaccgtgctgcatgccggggggaaattcggacagggcggctataaaacaagcggcggtctgcatggtgtcggtgcatctgtcgtaaacgcattatcggagtggctgacggttactattgagcgtgacggatatgtgtataaacagcggtttgaaaacggcggcaagcccgtgacttcacttgaaaaaatcggaacgaccaaaaaaacaggaacgcttacccattttaaacctgatccgtcaatgttcagcgcaacggtttataattttgacacgctgtcagaacgtctgcgcgaatcggctttcttgttaaaaggtttgaaaatagaattaattgatgaacggaacggcgtaaaagaagtattttattatgagaacggaattgaagcgtttgtcgcttatctaaacgaggaaaaagacgctttatgcgaagtggtttcctttgaaggcgagcatcatgacattgaagtcgatttcgcgtttcagtttaatgacgggtattcagaaaatatgctgtcattcgttaataacgtcagaacaaaggacggcggcacccacgaatcaggagccaaaacggcaatgacaagagcgtttaacgagtatgcgcgaaaggtcgcccttttaaaagagaaagacaagaaccttgaaggcgccgatatcagggaaggtttgtccgcaatcatttccgtgcgtatcccggaggaactgctgcaatttgaaggccagacgaaagggaagcttggcacaagtgaggcgagatccgccgcggatgccgtcatttccgagaatcttgcttatttcctggaagaaaaccgcgatacagcaaccctgcttgtcaaaaaagcgattaaagcaagccaggcccgtgaagcggcccgtaaagcgagagaagaagcgagaagcggcaaaaagcgcaaaaaatcagaagcgacgctgagcggaaaactcacaccggccggttccagaaatccggcgaagaatgaattgtatctggtggagggagactctgcgggaggttctgcaaaacagggaagagaccggaaattccaagccgtgctgccccttcgcggaaaggtcatcaacacagagaaagcaaagcttgcagacatcttcaaaaatgaagaaatcaatacgattattcatgcgatcggaggcggtgtcggcgcagattttgagatagacgacatcaattatgacaagatcatcatcatgacggacgcggataccgacggcgcgcacattcaagtcttgctgttaacatttttctaccgctatatgaaacctttaatcgagcacggaaaagtcttcatcgcccttccgcctctttacaaagtgagcaaaggaagcggtaagaaagagattattgaatatgcttggtccgacgaagaaatggacggcgttttaaagaaagtcggcaaagggtataccatccagcgctataaaggtctgggagaaatgaacgcagaccagctctgggaaacgacgatgaatcccgaatcgcgaacgctcgtcagagtcaagatcgacgatgcggcacgggtagaacgccgtgtaacgacattaatgggagacaaagtagaaccgagaagaaaatggattgaaaaaaatgttgccttcggattagatgaggaaagcaatattttagaaaatgaaaacttgtcggtcgctgaggaggtttaatagtggcacagccagaattatttcatgatttaccgttagaagaagtaatcggcgaccgtttcggacgctacagtaaatacattattcaagacagggcgctgcccgacgctcgtgacggtttaaagccggtgcagcggagaattttatacgccatgcacgcagacggaaatacattcgataaaaatttccgtaaagcggcaaaaacggtcggaaacgttatcggtaattatcatccgcacggtgacagctctgtttatgaagcgatggtgcggatgagccaggattggaaagtgcggaatgtgctgattgagatgcacggcaacaatggaagcattgacggtgatccgccggctgccatgcgttatacggaagcgagattatcttctatcgcgtccgagcttttgcgtgatatagataaaaatacggttgaattcgttccgaactttgatgacactagtaaagaaccggttgttttgcccgccatgtttcctaacttgcttgtcaacggatcaaccgggatttcagcgggctatgcgactgatattccccctcatcatctgggtgaggtcattgatgccgtcattaaacggattgaatctccggattgcaccgtcgatgacttgatgcaggtgattaaagggcctgactttccgacaggaggcattattcaaggagtcgacggcattcggaaggcttatgaaaccggaaaaggcaaaattattatccgcggcaaggctgaagtggaatccgtaagaggcggacgggagcagatcgtcattacagaaattccgtttgaagtaaacaaagccaatctcgtaaagaaaatggacgaataccgcatagacaaaaaagtcgaaggcatttctgaagtccgggatgaaactgaccgcacggggcttcgggtggtcgttgagttaaagaaagaagccgatgcaaaaggcattttgaatttcttatataaaaacactgatctgcagacaacatataactttaatatggtcgccatacataaccgccggccgatgctgatgagtcttacggccatcctggatgcgtatatttcccatcagaaggaagtggtgacaaaccgctccgtctttgaattgcaaaaagcaaaagagcggcaccacatcgttgaaggactgatgaaggcactgtctgtgttagatgaggtcatagccgtcatccgggcaagcagcgacaagaaagatgcgaaacaaaacgtaatgtctaaattcgcatttacggagcctcaggccgaagcgatcgtatccttgcagctgtatcgtctgacaaacacggatattacggcgctaaaagaggaagcggaagagctcagcaagaaaattcaggagctcgaagccattttaagtcatgataaaaagctgttaaaagtcattacaagcagcctgaaaaaattgaaaaagacctatgctgacagcagacggtctgtcattgaagaaaagattgaggaaattaaaatcaatcttgaagtcatggttgcctctgaggacgtatatgtgacagtcacaaaagacggctatgtaaaacgaacaagccagcggtcatttgccgcttctaacggccaggatttcggtatgaaggatactgacaggctgattcaccaatttgaaatgaatacaacggatgttctcctgctctttaccaataagggaagctatgtttattgtccggttcaccagcttcccgatatcaggtggaaagacatggggcagcacgtaacgaacatcatcacgattgaccgagatgaaaccatcgtgaaagctataccggtaaaagaatttgatccatcttcatatttattgtttatgacgaaaaacggcatggtgaaaagaactgaaatgacgcattacaaagcgcagcgttactcgaaagcgcttgttgcccttaaccttaaaggggacgacgagctgattgatgttcatgtcacagacggcggcagccagctgtttatcgccacccgcctcgggtacggtttatggttcggtgaagatgaagtaaatgtagtcggtgcccgtgcggccggcgtaaagggcataaatgtaaaagacggtgataccgtcgtatcaggacaaattctgcatgagacagattcgcttgtccttgtcacacagcggggagcaatcaagcggatgaacctatctgaattcgaaaaaacatccagggcgaagcgcggtgtcatcatgctgcgtgagcttaaaaagaacccgcatcgcgcagtcggcgtattcgcgtgcgctttagccgacatgatcgctgcggaaacagaaaaaggcgagagaatcgaaatcgccgtgaagtccttgcgggcgaatgaccgatacagcaacggctccttctttaccgatgaagatgagacagggccggtaacagatgtatggcgtatccccgcgtctgatgtttaagagtaaaaataaaataaaaaaacctccgctcattgagcggaggttttactatttagctttcatggctgccgaataagtcagtgatagcgtgaacgacttcgattccctgccatacaaataaattcaatgcagtgaatgaaaacaaccctaaaatcaccattcgtaagataaacaacatgtttaacaacctcctcattttatgttacatagataggcgatgttgaacatgaagctcatcgaaatacgaggactgataaaatttagcgattaaaaagcttttctttcgctgtcttctccgggaagcggggcgtctcctgtctgatatcacgatcagtgagacagaagcggcaaaaagcgccgtcaagatatatgagcccgtcagcgattttttctcatcatcagcattttggccggccttcatttcgtgcatttcctgctggtcggctaccgctttaaaatgatgagcagtatcgaacgcatggggaatggagagcaaatgaaagcttgcaatcgctaaaaataaaatagaagcttttaaaaacaagatttttttcaaatgttctccccccttcataagtctgaatatttttattataataccctaatttaaatgtaaagtaaacatatttattaaatttaaaaaattattatcctggttaagtatataccattccatccatcttttcatctcttttttcttaaagacctatttgttatgatatgcacgcattccttatggcatgacaacatttttcgggctgtaagataaaaaacggggcatgacagcaaaagacgtgatgtagaaaccgaaacattttcttaaaaaaacttctcaaccactgttgttgtgatataataatactcgttgtgttaaaagatctaacatatgcagcaaaaatgacagtaaaagatatgtaaaagggaggttaaacatggaggctttcatcagtgaaatcataaatgttccaaatgattttatttggaagtatcttgtttatattttagtcgggatcggattgtactttacgttccgttttcgctttattcaattccaatactttattgaaatgtttagaatcgtcggggagaagccgcaaggaaataaaggagtgtcttcaatgcaggcattctttatctcagccgcttctcgtgtcggaaccggaaacttgaccggcgtcgcgctggcgattgcaacaggcggtccaggcgcagtattttggatgtggatcgtagcgattgtcggtatggcttccagctttgtggaaagcaccttggcgcagctgtataaagtgcgttccggtgacgaattccgcggcggtccggcatattacatggcaaagggactgggcgcccgctggctcggtattttattcgccgtattgattaccgtttctttcggacttatctttaacgccgtgcagtcaaatacgatttctgtggcgtttgacgaagcattccatgtgaataaaacagttatcgcaatcattttagctgtattaacggctttcattatattcggcgggctgaaacgtgttgtatccgtttcgcaatttatcgttccggtcatggcgggtatgtatattctgatcgcgttgtatgttgtaattgtgaatattaccgcggtacctgaattgcttatgacgattgtgaaaaatgcgtttggtcttgagcagatcgtcggcggaagcttaggaagcatcattattatcggtgcgcagcgcggcctgttttcaaacgaagcgggtatgggaagcgcgccgaatgccgcagcggctgcacatgtgtcgcatccggctaagcagggattaattcagacgctcggcgtgttttttgatacatttatcgtttgtacatcgactgcctttatcattttattgtacagctttacgcctaaaggcgacggcatccaagtgacgcaagccgcattgcagcaccacctcggcggctgggccccgacatttattgcgattgcgatgtttttattcgcattcagctctgtcgtcggcaactattactatggtgaaaccaatattgaatttattaaaacaagcaaaacatggcttaatatttaccgcgtattcgtcgtagtgatggtggtatacggatgtttggctgacttccagatcgtctgggacatggcaaacttgtttatgggactcttggctctcattaacttagtggcaatcttactgctgagtaatgtagcctacaagatctataaggattatgccgctcagcgcaaaaaaggtcttgatcctgtattcaaagccgagaataccccggagctcaagcatattgaaacatgggcggaagaagaaggtacaagccccgaacgtaagactgctaactgaggaaacatgcatacaattttcaaaaaaccccttacattttgttgtgaggggtttttttatgtgaaaaaccgggttatttttactgaaaacagatttttttgaatttattgtatttttctcttgcgtgtgtaagggttttcatataaagttttactaaaccggtttaccaaaccgatttagtcttaaaagaaaggagtattgatgtggcttctgattatggtatttttacgatcggtgatgcgatgatcaccttaaatcccgcaagcacaggacctttgcgttttgttacccattttgaacgaaaagcaggaggagctgaactgaattttgcgattgcatgcgccagattgaatctgcactcaaagtgggtcagcagactggggaaggatgagttcggcagagtgatttatcagtttgccaaaggagaaggaattgatgtgactgacgtctcctatgttgaaggctttcctacatctttaaatgtcaaagagatcagaaatgacggttcaggcaagacgttttattatcgtttcaattcaccaattctgactcttgcaccggaagatataacagagaatatgtttgccggcattcacatcgttcatcttaccggtgtgttcctcgcgcttgataagaaaaatcttgaaattgctgaaagggtgctttccatcgccaaagcaagagggattcccgtatcttttgatccgaatatcaggctgaagctgtggacgattgaggaggcgcgtgcggcatttcatcaaatctttccgcatactgatattcttctggcgggccgggacgaaatgaaacagctgacaggtataggggaaaatgaagcattagcccggtttgcagagacctattcaatcagccagctcgtcataaaagacggtgaagcaggttctgcgctgtatcatgatcataagtgggttcacaaagaggctttcccggttgcgcctgttgacacggtaggagcgggtgacggctttaatgccggctacctgtacagttatctgcatggttttgaaccggaaaaacgtctggagtttgccaatgcggtcggtgcgctcgtcaccacagtttccggtgataatgaagggcttccctatctagaagaggttctgtcatttgtaaacaaagagactgtgattgaacggtagcaagcacaacttaaaaagcgggtgagaaaatgaaagcggttcaagtacggaaagcatttgatctgatggtgacggaatgtgagaaaccgtctgttgtccacgcggatgatgttcttgtcaaggtgaagcgggtcggaatttgcggatcagatttgcatatttatcatgggacaaatccgttagcgtccctgccgagagtaatcggacatgaagtcacaggggaagtcgcaaagaccggttctcatgtccggcgtttcaagccgggtgaccgcgtagtggttgaaccgatatcttattgcggaacatgctatgcctgccggaaaggacgtccgaacgtctgcaaagcgctttcggtgttcggcgttcatgaagatggcgggatgcgggaatatatcgtggttccggaaaagcagctgcatgccgtttcccgcgatctgccctgggaggaagcggtcatggcagaaccatatacgatcggcgcccaggccgtttggagaggccgtgtcgagaaggaagataccgttttgattcagggagcgggaccgatcggaatctgcatattaaaaatggcaaagttcaaaggcgcttccgtcatgataaccgacttgaatgatgaacgcttggcattcgctgaaaaaaacggtgcggacgttaccgtcaacgcgcaaaaagaagatcccgttttgcgggtgaacgaatggacaaaaaaagaaggcgccaatgtcgtcattgatgccgtctgtctcccctcaacgtttgaaacgtccattgacgcggtgtctccggccggtcatgtggttgtgcttggttttgatgagaggactgccggcatttctcagcttccgatcacaaaaaaggaagtcacgataaccggttcaagattgcagacgaatcagtttccgtacattacagacttactgaataaaggcctgttaacgcacggcggtcttattacacatacattttcagcagatgacgtccatcaagcatttcagttgatcgaacagcacccgggcaaggtgggaaaagcaatcattacgtttgattaaaggaggagcgagaatgctgcctaagtacgccatttacgaaaaacttctgcatgcacaagtggtggctgtcataaggggacaaaacagccaagaggcgcttgaagtttcaaaagcggccatttcaggaggtatcagcgccattgagcttacatacacaactcctgaagtggaagatgtctttaaggaactccggcatcaagatattcttcttggagccggttctgtaatggatacagaaacggcgagacacgccattttatcaggcgcctcatttatcgtcagctctcattttgtaaaagagatagcgtctctatgcaaccagtacagcgtaccgtatcttccgggatgcatgagcgtgtctgatatggctttggcgcttgaagccggatgtgatgtggtaaagctgtttcccgctaattcgtttgacccttcatttatcaagtcggtcaacggtcctctgccgaatgtccgcattatgccgaccgggggtatctcattaaacagcatgaatgactggctctctgccggagcggtcgcggtcggtgtgggaagcgacttgacaaaagcttatcaaaagggcggctatgaagctgctgtatccctcagcaaagaatacgtctgccgaaaaaacgaatatacgggggtgtaacatgaatatcacgtttcgctggtacggccaaggtaatgatacggtgactcttgaacatgtcagacaaattcccggggtcaaaggcatcgtctgggctcttcaccagaagcccgcgggcgatgtatgggaaaaggaggacattgaagcggaagtcagatacattcaatcctatgggtttcatgcagaggtcgtggaaagcgtgaatgttcatgaagccattaaactcggtcatgaagaacgcggacaatatattgagcactataaacagaccattcgcaatctgtccgaattcggcgtgaaagtcatctgttacaatttcatgccgatatttgactggacgcgtaccgatatgttccgcgcgctggaggatgggtcaaccgctttgttttttgaaaaagcgaaagtggaaagtctccctccggaggaactcatccgcacggttgaagaatcttctgatttgacgcttcccgggtgggagccggagaaaatggcccggatcaaggaactgtttgaggcctatcaaacggttgatgaaaaacagctttgggccaatctagaattctttttacatgaaatccttcctgtagcggaggaacacggcattcaaatggccattcatccggatgatccgccctggtcaatttttggcctgccccgtattatcaccggtgagaaaagttatgaaaagctgcaagagatttcagattcacccgccaactgtattacgttgtgcacgggttcgatgggagcggatcccgccaatgatatggtgaagatcaccaaacactatgcgggagctgcgccgtttgcccatatacgaaatgtgaaaatctgcgataacggtgattttacggaaacttcgcatcttaccagtgatgggtccattgatattaccggtgtggtaaaagaattgcacggccaagactataaaggatatgtacggcctgatcacggccgtcatatctggggcgaacaatgccggccgggttatggtttatatgatcgtgctttaggaattatgtacttgaacgggctgtgggatgcgttctcgtctcatgagaaaggggtgaagagatgagaccgattcatgaacgtttatcaggaagaaccgctgtcataacaggcgggagcggtgttctctgttcagcaatggcaaaggagctttcacggcaggggatgaaaattgcgatcgtcagccggaatgctgataaagcagagcgtgcggcgggcgagattgctgacgctggaggaaccgcggtttctgtaccggctgatgtttcagcccgtgattcgctcgaaaaggcaaaagacgagattatcagccggtttggttctgtcaatcttttaattaacggagccgggggaaaccaccctgatgcgatcactgccagtgagacgtatgaagaggatgagcagggcacatcattttttgatatggacgaaacggggttttccagcgtattttcaaccaactttaccggtgcatttctggcatcgcaagtgtttggaaaagacctactgaaggcggaatgtcccgcgattattaatatttcttctatgagtgcgtatacaccgatgacaaaggtgcccgcctacagcgcggccaaggcggcgattcagaattttacgatgtggatggctgttcatttcgcaaaaaaagggctgcgggtgaatgccatcgctccgggtttctttttgacagcgcaaaaccgtgagttgttattacaggaagatgaaagtctgacagaccgatccaataagattatggcacatacaccgatgaaacgtttcgggaaaccggaagaccttctgggaacgctcctgtggctttcggatgattcatgctcaggcttcgtcaccggggtcaccgttcccgtcgacggaggttttatggcttattccggagtgtgacagaatccatgtccctgtcagattgtaaaccatttacttctgacttatactagtgaaaaatgaagacagacggggatgagtccatgaaaaccattacaatttctgatgtggcgaaatttgcaaacgtatctaaaagcactgtatctcaatttttaaatcagcgctatgactatatgagcgagaaaacgaaacaaaaaatagaagcggccattcaagagctgaactatcagccgaatttcgtcgcccgcagcttaaaacagaaatcaacatttacagtaggtgtggtggtggctaatattcttcacactttttccactcaggtcatcagggcggtggaagactattttcatgaacaaggatttcatattattgtctgcaatgcggatgatgaaccggaaaaagaaaagaaatatattgaaatgctgcgggctaagcaggtggacggaattattatttttccgacgggcgaaaatctctctttatatgaaaagatgaaacgcgatacgtttccggtcgtgtttatggacagaaccattgaagaactcgggattccgacagtgatgcttgataaccatcatgcagccggtcttgccgttgaccggtttatcgaaagcggcattaagagaattgcgattattacgacgtccattattcgggaaatcagtccgagggtagaaaggattgaagggtataaaaaggcgcttgaccgccacggaatgatggtgcgggacgaatatatcaaaacagccgatgcggctgatatttccaatgttttgtcagagctgttctcacttgaggagcctccgaaagcgatattggcggcaaacgatatcgttcttgttgaggtgctgaagtatatgaaggagcatgatatgacaattccggataaggcagccgtcatcggaattgatgaagttccttttgcgggtttttttactcctccgattacgacgatcgtccagcctgcggcagaaatggcgcgaaaagcgggaagccttcttcttcgccagatacaagaaaaagatggcggtgaaaaacggattcaccgctataaaccggcgctgctcgcaaggcaatccggataaccggtttcattgcataaaccggtttactccggcaatttaaatgtctgaatattatgaaatgagagggggattttatgttctcaaaagatagattccctattattcttcttttattttcagccggggtgattaactatttagaccgctcagcgctgtctattgcagcgccgttcatacagcaggatctcacattgtctgcaacccaaatggggctgattttcagcagtttttctgtcggatacgctgtgtttaactttctcggcggtgttgcatctgaccggtatggggctaaattgacattgtgtacggcgatgatcgtttggtctcttttcagcggagcggttgcgcttgctttcggatttgtaagtcttttgattatccgtgttttattcggtatgggagaggggccgctgtcggctgccataagcaaaatggtcaacaattggtttcctccgtctcagcgcgccacggtcattggtctgacaaacagcggcacgccgctcggcggggcgatctccggcccgattgtcgggatgattgctgtggcgttcagctggaaagtttcctttgtcctgatcatgatcatcggtttagtctgggcggtcatctggtttaaatttgtcaaagaatggccggcgccgacggaagacgccccggcaatgaaagcggcgattcagtcgcatgagcagcatatcccgatgaccttttatttgaaacaaaaaacggttctcttcacggcttttgcctttttcgcctacaattacatcttatttttcttcttaacatggtttccgagctatctggtgaaagaacgcggtttaagtgttgaatttatgagcgtggtgactgttattccctggattcttggatttatcggtttggcggcaggcggaatgatttctgattatgtattcaaaaaaaccgccggaaaaggggttttgttctcacggaaagtcattcttgtcacttgtctgttcgcttccgctgtactgatcggatttgccggacttgttaccactaccgtaagtgccgttattctcgttgctttatcagtcttctttttatatataacgggctctatctattgggcggtgattcatgatgtggttgatcaaaggaatgtcggatcagtcggcggctttatgcattttcttgcaaacacggccggtattatcgggcctgctttaaccggctttatcgcggacaaaagcggatcattctccggggcgtttttgcttgcaggcggattagccgttttggcctcggctgcggtaatccgtttcgtgcgcccgattatcattcaaaccgcttctgaagataaaaaagacacgataccttattcataagttatcaaagccactgaggctgtcctgcagataacgggatggcctttttgttctgccgcttgatctgttcctatgataatataggaattgtttacaaaagaagggaagaggagggggcatgaaacagaagccgatatatgtcgaaatcaatattgcatctgatatagaaacgctttgggaatatacgcaaaacccgcatcttcataaggaatgggatctgcggttttctgacattacatatcttcataggctgccagatgaaccgcagagatttctatatgaaacacgaatcggttttgggctgaaggtatccggcacgggcgaatcaataggtgacataaggcctcgctcgtcagaaagagtgtcttcgctcgcttttgcctctgatcatccgctgtcacttataaaagaaggcaggggctactggaagtatatagagcgggataacggacaaaccgcatttttgactcaatatcaatatgaaacggcccgcggtctgccgggaagttggatagaccgttttttatttcgtcctctgctaagctgggctaccgcatggagctttgatgtgttgcggctttggatagaacaaaacagacatccgaagatatcagtccgtttcggatttgtctatgtctgtatgtgtctcgtattcagtctgtattggttttttcaaggctttcatgatggctgtgccgatgcagagatcgtgaggggagcgctggagacagggttaggggtattatggctgcttcccatgcggagaaagtggctgattcacaccgggcagtcagtcttcttttgtgtaacggcactgctatattccggcggcggattcgtgatctcattaggggtgcttacgatagccgcaatgattcttaagcccaagctgccgagcgcctggcatacaaaacgaaagagagaagtgaaatgacggattcaatgtatgaaaaagcgattactcattatcaatcactgcacccgatgctgcagaaacggtacagatttgacggatcacgcacgttttgcggagaaggaattatgtcagaaataaagggaggttcttttcttgtcagaatgcttttaaagacaggtgtttttttcagatgttttttctcagagaggggaaacgatatccctttcactatcgaaaacaaaaacaggcaaaatggcgtggaatggaatcgtacctttttctttaaaagcaaaacgcgtttttttgatgccgtcatggaatatgatgagcgggaaaacagaattcttgattacttcggcaaaccccgcatcctactgtctgaactgcatttagaagcgtcttcagacggagggcttgttattacatccggaaggcagtggctcctgatagtcggaaagaaaatcccgcttccggcatggctgtgcggcagttcaaccgtttatgaggcttatgatgaggaaatgaattgcttcagcataaaggttcatgtgaaaaaccggatactcggcacgcttttctcttaccgggggactttccgtgaaacagagggggaaacatgctgaagcgttatctcatggtaagcgtgatttgctttttgggatttgcggcggctgaagctccgcatatatcagctgctgagacgtttgttttattttccgtactttttttcgttcccgctgtattcgattttgcttttcggccgtcaaagaccttagagaatgtgttattacggagttatcctgttgccgctttatgtgcggtgcttgcgcttgtcacagacttcagtttttttgcctttgtgtggctcatttatacgcttgggctggcactgtatgctgtccggcggctgatgaaaacaaatattcacagaacagaagagatgtctgttatggcgggtttcatttatttggccgggggcggattctggttcttcgcatatgtccttgagattcccgtcatgaatttcggcccgcttatcgttctgctgacggcggtgcactttcactattccgctttcctgattccgatctttaacggattgctcggcaggatcatacgggagaaacgggttctttacagatggagcacggtcattattttgatttcgccgatccttattgccttggggattacattttcaaagacacttgatgtgattgctgtcgctctgtatctggcgggtctgtatgtaaatgcatatctcgtctttacggcgccgtttgttacgaaaacaggcaggatcttgatcaggagttcttcggctgtgttaatgattacaattgctttttctttgatatattcgtacggtgtctaccgcgaggaggcaacgctcacgatcagccagatgatttggattcacggggccgtcaatgcattcggcgttatcctgccggctttggcggggtggaggttggaaaatccgagatcgtttgatgagggcagcgaaagaacgttcagccgtatttacgggaagagaacgataggcaaagactttttgactgatattcatgcagcaaatgacatccattataccggccttctggatcagatgagagaactgcattctgaagacttttcaactcaaaaactggcgccggccgttaattccttttatgaagagacaattgattatgatatcatggcaaaagtgacgtggagcggatggtttcgtccgttcgcgcgcgtgtacgagccgttcagcagaagagcggggcagattcacctgtccatgaatccggattggtatatcatgcacagtgatattataggagttgactctgacaaagacggcagaaaaaatgtccgtgcgtggatcagaacaaatgaaaagcaggaaaccgtttttactgcgctgtattcagcgtacagggcaaaaggggaaggatacatgaatatctctcttccgctgccgtacggccaaatgacgggcattttaaagccttatgcgcgtaagcagaatcttgttttgacaagcagacggcgaaaaagcggagcgggtgatgaagggatttatctgcagacgaaatgggggacgtgtcatcttccgctggcagagacatttcttatttcagcccagagcgaaacaagcctgaaggccgttcatcatatgtggctgttcggactgaaatttttaactgtgcattatcggatcactcatgcttccgcaggtaaccgaagcaaataacaagctgcagcgccgtctgttcatcaggcggctttttctcatctgctttatttgcgagctattttgcggcggatgacacgaaaggagtcatgcgctggatctcatttattctcgtgttagctcagctgtcagggatgagcatgagcggttatgttgtcagtgaatggggatggcacgcggcattttggatcgggagcggcctcggtctttgcctgtctttcatgattcgcgaaatgaaaatgacagcaatgtttggcttcacaatggcgagaaagaaatcagcttgttgtcttttcgtttatgactaagcacgcactggctctgctagtgataggaacattagttcgcaggtgcggaaacgggtaacattaaagctgttttacttactcgcatccgtttttatttttatcattccttttaccgtcagcccgatggcgctttatctggtccaggttttaataggtttttcactcgggcattatttttcctttgctgcttggaatgtcgattgagtctgttccggaagacatgagagcaacatcgatgggggtgtaccaggcgctttgtgcactcggtattttcggagaacctttagccgagggattttttaatgattggctggggctcagagccggattttatttcgcgggggtgctcgggctggcagctgtcatacttgctcatatgtggggagccgatgcaaaaactcgtcggaaaaaagcagggaagatgcggcaaagtattatcagacatgattttattttttgtgtacgctttcaaaaaagaagagatcttattcggataaaatccattccaatatatgtatttttagtgaaagtaagtatttgatctacaaaatatgacaaattccctttgttcaagatggtaaaatcagattgcctgctaagtgagtaagcagcaggcaacaaatcaaaagggggcaatattaatgttaaaaagtaaaattaaaaaaatagccggtgcggctgtaattgctggagcattattggtttccgtgtcgccagcaaaagcagaaactcttccgggattgatctgggtcatggacaaatatactgacgcttttaaattcgacatgtttattaaaaacggaaatgaaaaatgggtttatgtttacacaagattatccgatggcaaagttgatgtggaagaagtaaagtgtgaaacaatttataaagatcgatgctatgtaaagcagtaagaaataaatacaaatcgtaaaacatcctattttttaattctgtctcatcaactaagtatacttaagataacgagacaggattttcgttgaagattttacttcctagaatatatattatgtaaactaggaatgatgtagagaatataaaagtggatccatattctaagagcatccccttttgtaaggaaaacctctacggccttaataaattaaattggtcataaaggtttttcagtttgagtattttaatcggttatgtcacttgttgctggtcttcttgatcaagtccacgccatcgtatgccagactttccacacttgcagccttctgcagtatgtaatgatcaaaaaagttcttcgtatagtctgtaacaagatttcgcatctccatggcatcccgttcacctctaagttccttattcacactggtaaacacgatgtcgcagtaatctaaatgcgcagcacgatcaacagagaaataataggtatccatgctattgttagcgccaatgatcgcattcatgttatagttcggttcagaaaacagcagcaaaaagggtttcttaaggtcgctgccctgaaggccgaacgcaccgctatccaagccaatcccgcaggcgaaccgttcgtcgtcccggcaaacaatcgccgtcgtaggccctccataagaatgtccgactatgcccatgccgatatcaagcaacaatctgcccttaaagatggaattcagctctccagaatccaatttgacaagataatcggctacataccttacatcttctgcctgtaattcactatactctgttaacttgtcaagtatcggcagtgtaagcacgttttggcacatctcaatggcagtttcatcgtcgggctgcatttccatcttaccagccaacgccagcatctccggatcttcagaaaacgccataatgacatccgaaaaatcctttgatacattaaacattcgcccatctttacgcttatacatcgtgctattttgatggccgatgcttactacaacatatcccatgcttgccaagtctgtacagatcactgtaccccattctggagaaccgcccccgccgcaaacataaaataacaccggatagcgtttttccttcccggagagagcaaggtcgtcgtaacattgggtcttgatatctatagagtaagcatctttcaacgcagagagaagcgtctgctcatcaagcatttcgcagacttcaggaaacatgtacgttgatgtagtcttcccttcgctgctgtcggacggataatacacaaacgccgtcagttctctttttgtatgatctgatgccgtgtactcaaaatccatctgggttcggccgacagtatagccgccaattggctccggaaacgcgtcatactttttcattctcttgttcccccttacgtaataaaagtgacggatgtgaaatacacacattgctctacaaacgcttttcattacatcatatgttcagtgaatcatagctactccttggctttcttgagattgctaacaacccttgtactggcccatatactgtttcagagtttcatccgccacgtaaacctccttgtattgctgtttaagatgacaaaagcggacatcgttgctgatgtccgcctaaagctaactaattgggttctgttccccaaatcagttttccttgatgatataatgtgatttttttcgttgttttaaacgtatttgattggaaaaaggaataatcgccgctttgtgcataattgctccagtcatcattgtgaagacgaagctgaatattccctgtgcttgctcccggtgacagcgttcctgttttaaaccccagttccagataggtatctgcaccttgcttaggtttatgcagcgtcacaaatttgtgggtcagattgccgcatcccatctgcgcgtagtcacagtcaaagttttggcctttgtttttcacgttataccagtaacgggcagtgacatcttttaaatcaaccgtcgcattgccgttattttttatgtgaagctgcgggcggatttgattgctgttcacaagcccatcccctgctttgtattgtacagaaacgcctttttcctgtgtggggttatcttgtgctggcgtttcagggccgtccttcgttgaatctttagtgccgcgaatgttttctcttacgaatgttcctgaagcagttaaatctgacagcggccagccgcctgttttagatgctcccggctttaacgctgaggatgattcctgcttatcagaaagattccagttcacccagctgattttcttgctgtcgagataattcagccattcccgcgactggtcaaggaatataccgccatttccagacgcgtcgcttgttccccattccgtcacgaaaataggcgctcctttgctgagtgcgtagtttgctttatcccgtaaaaattggccatgtgtgccggcataaaaatgaagcgcgtacatgacgtttgcatcttttaactggtcatcggcagcatcattcacatcctggctccatgtaccggttccgacaatgatgatgttgtctggatcatttttgcggataacggaaatcacttcttccgcatacggtttaatatcacgcttccagttcacgtcaccgtttggttcgtttgcaatttcataaatgacgtttggcgtgtttccgtaaagacttgacatctccttgaaaaattcttttgccttctctttattttggtttgggttgccgtcatttaaaatatgccagtcaatgatgacatatatcccaagttcttttgccgcttcaaccgcttcttttactttatttttcacggacgggttgtcaatataaccgccatctgccgtatacatcgccgcgcggaaaacggttatgccccaatcgtctctcagccattttaagctgtctttattgacgaaatcgccataccattgcaatccatgtgaactgatccctttcagttgtaccgctttgccatctcggtttacaagttgtgtaccttttatgctaagctgaccattcttggctactggcgtttttgtccctgctgctgatgccggcgaaggcagcaagccgcccattgtcaataccgcaatcaataaacacgtaataaaaacagaaattgaccgtttcatatctgatcttttcctccttcgcatcattttggctctttcttatgagctcgaactcattgtaaaaatctttctcatgattgtctatcaacctaatttcttgtttttgggaggtgtaaaagcctgtcaatttgctctatctctattgaataagacacacctgacacatatagaacaaagaaaaccgggctgaatcgggactttacacgtcatttttcaatcgaatcgaaaaattaaatgtatttccaacgtagacacgctgaatgtgatgagtctcaatatggcattgaatcttatgattgctgtaagaagacgagtccttgttaatttaaggttgatgtaaggttcggattaatacgggttaaggttggagttgtacaataagattgtacttcagtgagggattcagccagaagaattcccccttcaataaatcatagaggtgaaaaggtttgagagaaaataaaattttgtcttcattatgttacttcagtatattttttgcgccgtttctgtttccgattatcgtctatttcttaggccaggatgatgtgaaatatcatgcgaaaaaatctttgtggacgcatctgattccttatttgatttttggaattggcatcatcgcttcaggtttacttggtatgaatgacatcaggcacaccgggcctttcctgcttgcgacgtatgctgttacattccttgtggcgatctattttttcatttggaacattgtcaaaggaatcaaagtgttttcggaacaataggaaaaaacggttctgttattaatcaacagaaccgtttttttgtatagccattatcataattgtatatctatcgttgtcccttctcccgcggtgctgtgaatggtgatgtcccctccgtgcttttggataatatcctttgctatggccattccaagaccagagcctgcatgcgtcgttcctgtatttgtccccctgtaatagcgatcaaacactttctccagctcctcttcttctatccctttgccgttgtccttaattgtcacatgagttcgttctttttgttcaagccgtacaacgatcttcacatcaggatcattgtgaacgagggcatttaaaatgagattcgtgaccgctctccgaatcaatatcgcatcaaggttcagcatcagcttttccaggttcgtttgaagttcaatggatttatccgcatatctagaatcgtttaacatatcaattaacgtttcccgcagcagcgatacaaggtttacccgctctgtatgtaacatcacatcgttgtttttcagccttgtcgttaaatttaaatcttccatcacatctttcatatagagggatttactctcaatgatctgggcgtactctctgatctgttcgactgtgagatggtaatttggatctttgatgatttctgcatagccttgaatagatgctaatggtgttttaatgtcatgagaaatatgactgatccactcttcacgcatttgctctaatttatctttttcttttttgcttaaagatagttgttccgataagtgattgacattatagaagacatctttataaatgcctttggatttcatgttgatcgtataatctccattagctaaccgctggattccttgaatgacacggccgagcggttttgtgagctgccggctgaatagatagccaatgagtaacgcgatcaatgcatctattgataataatatgatggttcctgcattgaacttcgtcacaaattccttggtatcatatgagaggataaattttccgagagagggatttttaaaccctataaagtaactgtactccttgccatttacttttttcccgccagcgtaaatggttgataataattgttcatccttatatttatgtaaatttacaatttcaataggcgtatattttttcttcagtcctttaggttctctatcatgataaacatcctgtccgttttcatctaatatttgaatccatgcattctgctcttttaaagctttttggccctctttgtttactgtgataccattgttcgataacgtgacatattgtcggaatgatcttgtgaaagtttccggtgtactttcttcgtcatgttggctgttcgcctggaaaacgagccaaaacataaaaataaataaattaatgaagactgtaatgatggtcacgataatgacagagaccatatatctgcctgttaatcgccaattcatccttacgcatcctttacaacaaatttgtagcctaaccctttcacagtgacgagaaagtctggttttgatggggtgttttctattttctcacggagcctgcgtatatgaaccatcactgtgttgtcagaaccgaagaaatcttctccccatacagcttgatagagtatttctttactgatcacccgattgggatgctgcagaaaataggtcataagcataagttctttaggtgttaactcaatagccgctccatttttggtgagctcggcttgttgttggtttaattcaaatggccctttttttattagggttccggtttgagaaggctgtaagtaagagacccgtctcagctgcgctttgacccggtatgcaacttccttagggctgaagggttttgtaatgtagtcgtccccgccgatggcaagtcctacaattttatccgtttcctccccctttgcagacaaaaagataataggaacgtgtgaaatgtctcttatttgcttgcagatatcatagccttcaccgtctggcagcatgatatccaatatcaccagatcgggattttcttgatgaaattgagccaatccgtcacgggcagtcgaagcggtgatcacacgatcaatgccttctcttattaatacggttttgatcagttccaaaatttctttttcgtcgtctatgattaatactttgctgtgaagccgtgacatataatgatcactccttgaagtcattgtcattattatacccaatgtctgtgtatcgttaaaaaaatcaacacttctatcccacagaaaataagccaattttctttttcaagtaagaaaattggcttattgcgatgctgatgcctttaacgctttacaacaaatgttgtcacgctttgagccggcagatgggcccaaaaatgattgtccgttactttgagatccgttccaggttgaagattgctgctgctgctcgtgatccatctggatacttgcgaagcagttccattctgcaatacgaagttttggttgacccctgtgttatttttattaatggcaacaatcacgaccttattgtctcctttataggctgacacgtaaacattcggttcaggatttttcgttgcatcaatccttacatagccagggcgcacaaattttgagaaatgagccatattgtatccgcgtttgctgatcatcccatcttctttcatagggccgtatgatctgcggatataccaccacacataagcttgaaaatctccctctaccattgaatgatgaatatgctctgaaacacctaaagcctcaggccagcgatccgctgaattgttgtcactattcggatagtatacctccgtcatccatagctctttccctcctcctttttgtttgaaaagaggataaggaaactgactgacctgagtgccgtacaggtgggttccgaggatatccatattcctaagcgcctgcggatcatttaaaatggggtccgatatatttttcaggtattgaaatgattccggcgcaatcacgcgggcattaatggaaccggcattctctctcatgaaacgcaggatttcttggggcgtccaccatgtccattcgtgagcgtaatcaggctcgttttgcatagaaatcgcatacagattcacaccattactcttcatgaaattaacgaaatcgttaagatgctgcgcgtatgcggcgtacttatcgtatctcagccgcttagctgttgtgtcaccattatgattgaaagtctcaaccatatcgtttggcggattccaaggggaagcaaaaacgattgctccatgtttgatcgcactctttgcagtctccacttccttgtaccaattatttctattttcatctacatgaattcttaagaccgaaaaacctaactgattctgtccattgccaaaagcggtctcccgttgagccgcagtcaagtctccaatccaagccgggtggttcattcctccaaaaccgcgaatcacttgtctatctgcagatatattaactgttgcatcacttgctgctgaaacttcagtaactcccggtcctaagagcatgacggacagcattgtgaaacataccaataatacacaaattgttttttttacgctcgatatcattttttcctctccttcatatgtcgtttatggacttagaaaacgtacctttgtctccctttgcttatctttgtgtaaactgccagtaatcgaaattaaacaagtttcctgtaccagttccggtaaatacaaagaatacgttgtgaacaccggatgcgccgcttaccgcagtttctatttctctccaagattgcgttccgcctgtggaagggacattcaaggttccgacaagcttaccgtttgcactatctagccgcacttctattttcccgccaagagcggacgctacatttgctttaaacgtcctggcgccgcctgacccgaaatctgcatttccaacagcaatccagtctccgttatgaatgtttgtgacatgttgattattgaccgggccgccgggtgctgaggatgcctctgtcaaaatccgtccgttccaggcaaacgtttccgcttctacgcggtgatatggattcaaattggatagctgtttgacacctgcaaaatttgccgctacctcttgcagggagccatctggattatgcacaagcttattaatatggggagaacggtaacctttgccggccccgtaaagagcggagctgacagtttgagtatgatacaccacataccactcgtttttaaaattgaaaacagcatgatgattgttcccgccgcctccgaaaaatgctcccggatttttcagaaagtgccctctatacgaaaaagaatctataggacttgagctggtcatatagccgatctcacctggaggtttatcggccgggtgcgcgcccccgaaattgatacaataggaatagtaatattttccgttatacttatgcattcccgaatcttcaaacataaaaggcgcatcaatcgtagacgcacttccggcaacactggtcatatcaggatctaatttcatgactcttgctgttttaggattggcccattgcccctgtgcgggatttgaaccgcccggaacgcctccgccggcatataggtaaccggtaccgtcatcatctacgaatactgccggatcaaaaagccatacaacaccggacattcctggcgtatttggcgttaccagcgcttttccgatcggatctgtccatgggccggtcgggctgtctgcggtgagaaccccgatacctccgccgccgtttgcgaaataaaggaaaaatttatccttaccattgatctttttcaccgcggctgacggggcccatgatgctcctgcccatttggcaatcccccggccgccattcgccccattggcacccgctgcgggaatcgttccgtgatctgtccagttcaccatatccgctgaagatatgacggatattttattcaaattggcaaatgaattatccttaatcgtgccgtcgctattatattcatagtcatcgcttgacatatagatgtagactcttccgttataggtcagcgcaaacggatctgcgcccagatgatggtcaataagcggatttgaattcccaacatgttttgcaattggagtgcttaccgcattcgcatattccccaggtaaacagctcaataataaagcaaggacccataggcatacccaacattttttacacataacttaacgctcctcctttatttaaaaatttaggcaacttttaccatctgagaacaaattgcagtaccggcagtaaaaagcagactccgcagttaagcaactcaataatagagctagtacccctaaacatacgctacacttttttctaataacttgacatcctcctttttccttaaaatgtatgatgatttttttaccatttgatgacaactggtcatggagaacggctctggagtaaaccttgcgaacacaggagtatgactctcgcctttttaataaaaacgccgctgagtgccaggccagcggcgttttatacttgatcatttacattttgtcaaactttgcgtctcccgcaaacgatcccattgacagttgttcttcaagaacaagtccgtgatgatgccgttcttcaatccgtttaataatagatcgaatggcttccgcattttcttcgatattgtgaggttcaaagatcgtcacgtgatctccttttaatttgtactcaagataatgctgtgctgttgattgtgtccagcccctatcatcggttacatcgccgcatagcaaatgatggatgttggcgttaacggcgccggaattgatcacttcattgtggtacgcaagatagcctctgattttatccttaatcgaaggaatggttaatatttctctgtaatagtccggaataatgtccatattcagatggacgatctcttcgatttcctcttccgataaatgagttacagaagtggttattttagaatccagcataatcacatcagatacggtgcggcctcgcttctccaaagctttagcagcctcaaaagccaaattcgatcccgaagagtaaccaagcaaaacaaaaggcccttgttcctgaatgcgtatcatgctttctgcatatcggtcaacgatttctttctcatgagacggctcttctaagaaatcagcagcatagacggtgctgacgccgtcaagtcttttcgccatttcattataaacgagtccatatccgattaaaggcgggaaacagaacacagggattgaatcttcctggttcagcttgacgaatacgttatgatccgtctcggattcgaaaactgccgcttgaatggcgcgtgccattgtttcgatggtaggaaaatcgtatacggcttgataatgcatgttgagtcccataccggcgttaatttgatgaatgagctgcaatactttaagtgaatggccgccaacgtcaaagaagtgatctttaatcccggggtcaggcagagctaaaatatccttccatatatcggccagctgcttttcaattaacgttcctggcgctgtgtattcggttccggtaagcctatttccctcaggagccggcaaagcttttcgatcgatttttccattagcagttatcggcatcttctctacttgtacaaaataagccggaatcatatacgcaggcagtttgttcagcaaatgacgcttcagctgcgccgtatttaatgactcgtctcctgacaagtaagcgcacagctgctttgagccctctttttcaatcgcgatgacgaccgcttctttgacagcatcgagttgtaataaagatgcttcaatctcgccgagttctatccggtagcctcggattttcacttgatgatcaattcgtcccaaatactcgatatttccgtccggcagccatcttgccaagtcgcctgtccggtacatccgcttccctgcttcaaatgggtgagctgcaaacttctcagctgtcagctccggacggttcaaatagccccgagcgagcccgtctccggcgatacacagctctcctgccacaccgagcggctggaaatattccgatccgggctgtacaatgtacaattgaatgttggaaatcggtttacctatcggaacggagttaagcgtttctcccgcttcacattcaaaatacgatacatcgatcgtcgcttcggtcggtccgtataaattaatgatttgagcctcgcccgccggtgtgatcatgcgatgaaacccggcaacgtgcgcaggcgtcaaagcctcgccgcttgcaaatacatattttaatgacgccagctttctctttaattcctcgtcggatttctgctccatggactcaagaaaagcatgcagcatcgcaggcacaaaatgcataatggtgacatttttctgcgcaatcgtatctaaaatgacgtcagggttcttttctcctccgtttgacagcaataccgctttagaaccagtcatcgaccaccagaacaattcccacaccgatacatcaaaggtgattggggttttttgcagaatgacatcctgcttatccagcgggtaatgttcctgcatccaaacgagacggttgattacggatcggtgttccaccataacccctttcggtcggcctgttgatcccgaagtatagataacataagctaagtgattcggtccggccgtctgtttcaagtttgaaccatcttcccaagagaatcgcggatcttccaggtcaagcacttttcccgtaaaaggcacgcttttcctcaagtgactctgtgctaacaacagcttcgtatccgaatcctccaatatatagtgaattcgttctaccggatagctcgggtcgatcggcacatacgcgccgccggcttttaagattccgaagagtcctacgatcatttccaaggaacgttcggccataatcccgactggctgatccggctgcacgccttctgattgcaatgtccgggcaagttgattcgctctttcattcagttcccggtatgtcagctggctttccccgtatacgacagccgtttgatcaggcgtacgctgtgcttgttcctcaaacaattgatgaagcgtcttttcctttggataatctgcttccgtatcattaaatgcctctattaggagcgaacgttcatctcccgtaagtatatccaagtcttggacgcgaatcgcctgactgttcaccatctgcttaatgatttgcataaaatgctcttccatccgcttgacacttgcatgatcatagacgttgctattgtatacaaaatgaatgtcgatttctccagccggcatgacaatgaaattgaaatcgtaatgggtatgctcttccatatggaaattgataatgtccagcgcgtcacgattcggtttcatatgctccatttgtttctcgaccggataattttcaaataccatgatatgactgatcagctgctgcttttgttcggtttgagcctgaatttcatacaacggaaatgtatcatacgcctgagaagccaatgcctgctcctggctcattttcaacacttgttccacagtcattccaggctgagcggtaatacgtacgggaatggtgttgataaataagccgaccatggattcaatacccggaatttctgccgggcgtccggatacaaccgacccgaaaacgacatcctgactgttgttgtatctttgcagcaatagcccccacgcactttgaatgaatgtattcacggtgacgtgatgcttgcttgcagtctgtctgatttcttctgacagctgctttccgagccggcatgcaagcctttgtttttgatatttcttggcttggtttgagacaggttctttcagtaaaacggtttgtccttcataaccgtccaaatatttttgccaataggccaaagcgttctgatgatcctggtcttccagccattcgatatatcggctgtacggggtgacggcttcccgctccggttgtcttctctcaagaagctcataataggtttcaaacacttctttcgtaataagaggcagacaccagccatccattaaaatatgatggaagctccatatcaatcggacttggtcgtcctctgtacgaaggattgatacgcgcattaacgcatcttgggtaaggtcgaatcctcttgccttatctttttgtacaaagccggcaatgaactcgtttcgttgtttattcttcatgcttcgaatatcttcaacagttatttcgatcggttttttttggaatacgatctgtaaaggctgatctttccattccgtataaaaatgagtccggagaatctcgtgtctttccgccagctgcgacaaactcattgtaaatgcctcaatatccaagtcgcctttgaggtcaaaagcggcttgttcaaagtaagctctggaagccgaatcgattaaactatggaacagcatacctttctgcatgggagttaaaggatatatattttcaatgtcgccgatatgctgtgtttgcttaacaaattgatctaattcctcgattgttatgtccttcagcgaaatatcgcttggcgtcaggtgaatgtgttcttgagctgcgcaatgttcgatgacttcttttaggctgttctttaagagagctgcacatgtttccattgtttctcttcgatattgtttaccgctgtaactgatggccaatgacagccgaccgtctgagatcatgccgttaatgtcaagcgtataggcaatggggtgcctgtcgctcgcaattttccctccggagtaaggagatacctcgattcctccattttcgaaatcttgatcaaattgtccgaggtaattgaagctgatttccggatgtccggtccattctgatgccttcggatgatcggacaaatatttcatcaggccatatcctattcctttttggggaatctgacgcagctgttctttcaccgtcctaatccgctgggagatgtcccggtccgcctggatttgaagagaaaccgggtattgggttgtaaaccagcccaccgtacgtgaaatatcaacgtcttgaaaaacagattccctgccgtgtccttccagatgaacatgaatttcttcatgccccgtccagcgatgaacagccattccgagtccggtcagcaataaatcattaatgtcagtcgtataggcacggttcgatttttttaataaacgctcggtttcttcctctgtccattggacgatgatcgtttccaggtcttcggccagaccggtctcctgctcattatcctttggcaatttgtgttgcgagatatgtttctgctcaagccaatattgatttttcgcttcaaattccgggctttctgcataacgtttcaatcgttcagcccataacagataggaatccgtcttcttagggagcgtgatcgcttctccgttttggagctgctcataagctgacgttatatcctcaagtaaaatcctccacgatacgccatctacaaccagatgatgaattgcaatcagcaaatgatcgccatcctgacattgaaacaatcccagtttcatgagcggaccatcggctaaatggatggattgctgaatgtcattggctatcatttctatcgtttcggcaaggttgttttcttcgagtaaagagaatacgtcgaggctgaataattctccttcactgatcccgcaggttctggcttcgtattcatgatctccctgaacatagaccatgcgcaaagcatcgtgatgctcggcaatcttcttcatgactttctgaagcttcgattcgtccaacccctctttaaaataaagcatgacagattgattataatggtgcggatcagggtattgccgggcgaaaaaccaatgctgaatcggcgtcaataaagtacggcctttgatttccccttgttctgcgattcgggtaacgggcttaataaaaggagcaagcccggagatcgtcgggtgtttgaacaagtgtttgatgtcaagcttatacccggcttgatataagcttgaggttacctgaatcgacttaatcgaatctcctcccagctcaaagaaatggtcatcgattccgacctgttctgcgcctaataccgattcccacaccccggccagtattttttccagttctgtccgcggagctgtataaggattgccggtgagatttcccgttggagcaggcagcgcctgacgatctatttttccgttggaagtaagcggcatcgctgccagctgtacaaaataagcagggatcatataggacggaagctgccgggacaggtgctcccgaatttcgcctgcggttaaagaatgctgtgcggtataataggcgcacaaggatgtttccccgttggtttcttgtgccgtaacgagagcttcttgaatcggcggtatttggaaaaatgcggattcgacttccccgatttcaatgcggtaaccgcggattttcacctggtggtcgatccggcctaaatattcgatatttccgtccggcagccgccttgctaagtctcccgtccggtacattttcacctctggtacaaaggggtgctgcaaaaatctttccgccgttaattccgctctgttcaagtatcctctggcgatgccgtccccgctgatatatatttctcccgggacgccggccggcaccggcttcatgctcttatccagcacgaaaatgttcatgttgtccgcggcggttccgatcggcactgattcccgtctgtcgttttgcggatcaaaggaataaatcatacagccgacgactgtctctgtaggcccgtattcgttaaaaatttcgatttttccgccgaatttcccgctgatgctacgggcgagccgcgtgcttaaattgtcaccgccgacaatgaatttccgaatggtgcactcagcagggatatttatctctttcaataactgcaagtgcgccggggtcagcttgataatatccgcccttgaatcctgaataatggaatcaagcaaggcagtactgttttctcctccgtagacaataatggcatttcctgtaatgagcggagtaaaaacagacgttatcgtcagatcaaaagcgatggacgaatataggggaaagttggttttttcccctttgacatagacccggcgggcccaccaaatataattggttaagccctgatgctcaattgccactcctttaggcttgcctgtggagcctgacgtataaatgacataggccaaatccttcgtactgctgatcggttccaggtaagagccgtcttcgtggtaagagctttcctgatcgaggaaaaccattgtgcccgcaagttccaactgtttttgaagatggctctgcgtcaggacgatatcagcttgggagtcttctactatatactgtatgcgatgcttcggataatccggatcaattggcacataggcccctcccgcttttaaaacggccagtattcccacgaccagttcgatctcatgttcgcagataatcgcagtgagccgatccgtctttaccccctttttccttaacgttcgggctaattgattggcacgttcattgagctgacgatatgtgaattgcttttctccgtaaataacggctgcttgatccggtgttcgtttcatctgttcttcgaataactgataaaccgtcttatcccgcggatattcagttttcgcagtttgattgtcaacgagaagtgaatgtgtctccgattctggcaaaatattcacttgaccgagggggagctcaggctgaaataatatgacagaaaatagccggtttaaatgtccgagcacctgcatcatatactgacgatcatagacttgttcattaaaacataactttatgtcaatcaagtcttcacccatagcaaactggaataaagcatctgcagcagccgtttctatgaaaccatcaggatgaatttgctctagcgaaacgactgtatcgatgatcggcaaatgatttgcattgtagttcagcctcagctgtccggccattttatcaaagggaacgtcctgatataagatcgcttcgtccaccgtatgtttcaattcatggaaaattgatttaaacgtactgccggaattgatatgctgtttgattaacatgagctggtctgaacgaagatcttcatcagtttcgtcttcaaagcttggaacccctgtaatcacgccttcttcccccgtgtatttgtataaaagggattcaattccgatcaggagaaccagatagacggccattggcgtttggttcgtcatggtcaggatgcgccgtgatacatccgcactcaatgaactgtgaatacagtcagatccacttgttatatcacgctttactgttgagtcggacatttgaaacgaagggaatgcactaggacggtcttccgtgtgaaacattcggccccagaacaactcctgttgtttgaattctgacactcatatccctccagttggtttcattcctgttttcaggcgactggcggcagccgcggcattcatgccgggacagccactgcccctgtgattagaaatccaattcgattgtgcttgcgagatgtttacttttgtttactttttcgcttaattgaatgtcttttaaaggaatggatgggtttctcataatcgccgaaaggatcatgacgtaatccttggccaatacagcaatggttttctttttaaacagtttcgtacagtaatcaaaactgccctgaatctcatcttggtctattaagaagttcagctgtaaatcaaacttggctgccgtctctgtttgttcataaggcctgactgcgagagagtccacttcaatatctgtttgttcggtattttgcaggacaaacatcgtatcaaacaatggattgcggcttaagtcccgtttcacacccagtttttcaactaattcttcaaaaggatactcttgatgttcaaaagccttcagcatggtttctttcgtttccgttatataatccaaaaatgtcttttccgccatcggagcggtgcggatggctaatgtattgacaaacattccgataatgggttccaaatccgcatgcggtctccctgcaataggtgtaccgacaacgatatcatcctgaccgctgtattttgccagcagtatggaataggccgagaatagaatcatgtaagcggtcgttccggtcaattcttccagctgctttatcccttgggtgacagtcttatcgagcgtaaaattgtgccttttcccatcaaagcttctaaccggcggtctcgcaaaatctttcggcagctcgaatgacgggagctcttcatgaaatacaccaagccaatactcttcctggctcttgattcgttctctttgttctttttgatgtttccattccgtaaagtctttgtactgaatacggagcggagctaactctttgccgtcatacaattgaatcagttcttcgacaaaaatattcatggaggcgccgtccgtgataatgtggtgcatgtcaaacatgaaaatatgcaggtcttgttctaactcgatgagtccggccctgagtaatggagcttggctgagatcgaacggccgcacgaaggtccggaaacattcctcaacctcgtcggctgttgctttgtatctttccatcgaaaactccacttgcgatttgatcatctgcaccggttctccgcggaccatttcaaaaccggtacgcagcgattcatggcgctggatcagtctttggaaagcggtttgcaagcgattcatgtcgagttttccttctaatgtaagaattcccggcatattgtagctcagttctccgccttctatttgtgttgacaggtaaaccatcttctgcacggacgatacgggatagacatcttttgctttggctttcggaatatagtccggtccgttggtttcagcttctgcaatagcttgtgccatttcttcaactgtcggacattgaaagacttctcttaatgaaatgtttttgctgaattgcttatgaattttggcgatgagcgtcatcccccgcaacgagtggccgcccaaatcgaaaaagttatcttttacacctatttcttttaccttcaaaacgtcttgccagatgcatatcagctgctcttccatattcgtccgcggagcaacgtagtcagtccccgtttgcaaacctgcttcaggcatcggtaatgctcttcgatttacttttccattgccggttagcggcagtttctccagctggatgaagtatgaagggatcatatatcccggtatttggccagcaagtttttctttaagctgactgatcgagagtgattgctctgctgtaaaataggcatacaaatcgctttggccatcggtattttcttttgctaggacaactgcttcctgtacgtgcttgagaagagcggcttccacctcaccgagttcaacccgataaccgcggattttgacttgatggtccctccttcccgcatattcaatgtttccctcgggaaggtaacgagccagatcgcctgttttatacatccgttgattcgagtcatatgggtgcggaacaaaagtttcgagcgtcaaagactccctgttatgatagcctctggccaggctcactcctgaaatacaaagttcaccgacgattccgacaggctgaagcgttccggcttcattcaaaatgaaaatctccgtatttgaaatcggttttccgatcggctgaagctcctgatctgtatcaggatcgacggtatacatggtcacaacatgcgtctccgacggaccgtaatgattatgcaatgtgacttggtgtcgtgccagcatgtcacgcagcatccttgttgcgatgagctgttctcccgcagcgatgatgtgatccacgcactcggcaaacggttcgaaatagtgtttctctgaggcaaggagcttaaggaacgctgtcgggagaaatgctgtttgtatcccgtgcgttctgacaaaatcattgagctgccgtatgtcacgttttgcctcattgccgatgataaagagtgttcctccgcttgaaagcgcggagaacatttcttgatagcagacatcaaagctcattgcggcaaattgcagcactctgtcaaagcgaagctgcgtatgatcctgctcataagcgagcagattcgtcatcgtcttgtgctccagctgaacgcctttcggctgccctgttgtgcctgacgtgtaaataacatacattaaatcattttccgagcaggaaagattaagattgtctgttctgccttgatatagtaacggatcatcaagcagaagcacttctccttcaaagagcggcggaatagcgtgacctgcacaagtcaaaagcacatcggcaccgctgtcttttagcataaaagcccgccgtttttcgggaagctccggatcgatagggagaaatgctgcgccggcctttaatatggctaaaatgccgatgatcatatgtgctgagcgatccgtgagaacggcaacaacctgatcagtgcaggcacccttatcttgaagaacgcgcgccagctgattggaacgttcattcagctgacgataagtcagcgtctgatttccaaacatgacggcttcatgatccgggttacgctcagcctgctgctcaaaaagctgatgaatcgttgtcggaattcgtttttccgcaactgcagtatcgttaaagagttgctgaatgtctctttcctcttccttggtcatcatatttaaacgagccagctcggcctcaggctgtttaataatcgaatcaaccagctgttcaaaatgccccatcatccgttcgatcgtttccggtttaaacagagccgtcaagtattccagcgtgaactgaatacccgccccttcttccacagcagttaaagttagatcaaatttcgccatcgtatgtccgtttggatatggtttgaaagtgacgtcatttatctctaactgttcctgctccgtgttttgaagcacaaacatggtgtcaaacaatggattgcggctcaagtctctggcgatattcagttgatcgatcagcgcttcgaacggataatcctgatgttcataagcttttaatgcattctccttcacttcggacagatactgagagaacgtcttccctttttcagggtaatttctcatcgccaatgtattgacaaacattccgataatcggttccaaatcggcgtgcggtcttcccgctataggactgccgacaataatgtcttcctggccgctgtattttgaaagcaataatgtataagacgcaaggagcaccatatataaagtcgattcagtttgggatgccagctgctttaatccgtcgcttttttgcttatcaagcgtaaaatgcattgtggctcccgcaaaatcccgtgccgacggccggatataatcggccggcagatgaaggacaggaacgtcgccgctgtacagctctaaccaataggcttcttgtttttgaatctgctgtaatctcgcttcgccggtctgccataccgcgtagtccttgtactggatgcgcaggggcggtaatgtctctccttcataaatccggataaattctttgatcaatacgctcatggatgttccgtcagaaataatgtggtgcatatcaaacatcagaattccgcggtcaggttgaagttcaatcagccctacgcgaagcagcggcggctcatccaggtgaaaaggacgaataaattggcggatataaaggtccgcatcatcttcttccccttggtaccactctgcttcaaacgccgcgtgatccaagacatactgaacaggttctccgtcagccattttaaaaccggtgcgcaaagattcatggcgcaaaatcagcgtgcggaaggcttgctgcagcttgtcacgatcaagctttccttccacagtcatcagtcccagcatgttgtaactgagttctccgccttccaagtgattcaggatgtacaaccgtttttgtgctgaggataccggataataaggtcttttttcaattgcaggaatcgcggcatacccggtcagctccgtcttcgtgatcgtccgtgcgagctgttcaatggttgggaaacggaagacgtcccgcaaaggaatttggacatgcatttgcttttgtatttttgcaatcagcgccgttgcccgcagggagtgtccgccgatctcaaaaaagtgatctctgatccccaactgctctagtccaaggacatcctcccaaattgctgtcagctggatttctgccgaagtttgcggcgggacgtactctatgccgctgtcacgctttttgaccggagccggcaataactggcgattcaacttcccgtttggcgtcagcggcatcttatccagctgcacaaaatgagcggggatcatatatccgggtaaatgccgggccattctttcgcgaagttcactgatctgtattgtcttatctgctgcaaagtatccgcacaagtaatattcatcatctgcatctttaagggcagctgcggcggcttcttgaatatcaggaacgttcagcatcaccgattcgatttcaccgagttcaatccgaaaaccttgaattttcacctgatgatcaatccggccgatatattcaatatttccatccggcagaaggcgggccagatcaccggttctgtacattcggtcctccggtacaaacggatcggcaacaaatttttcgtccgtcagttccggcaggttcaagtaaccccgcccgacaccgtcccctgcaatatacagctcgccttggacgcccttcggctgcagccgtttttttgaatcaagaatgtacattcggtttctgcctaacggcttgcctatagggacatagttttggctgcgtgcccaagcatcggaagaacattcaatgttgaacagagacgcgtctacgcaagtctccgtaggcccatatacattagtaatcccaggcgcagcgccatgctcgccgaataattgcttgagcttatttaccgtcgttttggaaagagcctctcctccgattaaaagatgctgaagcgtgactccctgcaaatcacctgcagctatcaaaagctttaagtgggcaggtgttccgtcagtgatgtcaatcgaatgctgccgatagtaacggcataaggcagcaccgtctgacactatctctttcggaacaataaacaaggtatggcctgacagcaaggaagcatacatttgctgaacagaagcatcgaaataatatggagcgagcatggctatattcagctccgcatcataggcagagtatacttggcggctcagcccttctatcaggtggatgacctggcgatgttcaattaacgtgcctttaggcttgcctgtcgtgccggaagtataaatggcataggccagttgactggactgataagagagtgcaagactgctgtctttttcgtgatagaaatgttcctccatgagatcgatacatgttcctgagaagccgatgtcatcctgcagcttcccgcagtaaagcaatacgctgatgcttgaatcatttaaaatataacggatgcgttcagacggagaatcaggatctatcggcaaatatgcaccgcccgcttttaaaactcccaagatgcctacaaccatctcaagcgagcgttcagtcataatgccgacaagctgatccgcctgcactccttttgcctgcaaggttcgagcaagctgattggcacgccggttcagttcttcgtaggtgaattgtttaccctcgaatacaaccgctgtattgtccggagtacgatgcgcctgttcctcgaacaactcatgaatcgttttttcacgcgggtaatgcatgtcattagactgaaagcggctgagcagatattctttttcttgctgagagagaagctccaaatcttctattttgacagacggctgccgcaatacttgctgcatgagtttttcaaaatgacctcggagccgctccacttctgatttttcatattcgttttcattaaaaccgaaatgaacggccagctgtttgccaggtatgacaaccacattcaaatcatagtgggagtgttcctgcatatgaaaattcgtaatgttcagctccgtaccatgatgtcccgtctcttcggcttgctgccctatcggataattttcaaagatcatgatatgatcaattaagttttgcttttgttccgtttgggcctgaatttcgtataaaggataggtatcgtacgattgggaagccagcgcgttttgttgaaccatttgcatcgtatcagcaaaagtgctgtcctcatcgcagcggatgcgaaccggaatcgtattgatgaacaggccgatcatctgttccacatcaggaatttccgccggccttcccgacacgacactgccgaagacaacgtctgcggacccgctgtatttctgtaataatactccccataacgtttggatcaacgtatttaacgtaacctgatgctgatttgcgatctgctgtaattgttttgtctgttcgtgatcaaatcggcagatcaaattggcataagcgtattctttttgttcatgctgcgctattttatgaagaagcgtggtttcacctttatatccttcaagatacccgctccagtaccgctttgccgctccctgatcttggcggtcaagccactcgatatagtcgctgtaaggaactgccgatagcggttctggttccctgccttcctgtaaggcgctataatgatcaaacacttccttcgtgataagagacaggcaccagccatccatcacaatatgatggaagctccaaatcaaatgatatttgcggtcttccatccggaaaatcgctatgcgcatcagcggatcccgagccaagtcaaatccttttgccttatcttctctttgataggctgcgattgcatcctctctcaggtgctcctctctatcacgcaaatctgcaaaatgaatttgcggtgtttgcgttttatagacaatttgtaaaggagtatcgttccagccgctgtaaaaacgggttctgagcacggcgtatgtttcaaataatcgttcaaggcttgctttaaaccaatcaatctttaactctccctgcaaatcgaacgatgcttgttcaaaataagaacttgaggcctcgtccaacaggctgtggaagagcattcctttctgcatcggagtgagcggatacacgttttcaacctcacctgcatgcggcagttgaatgaggagctgatccaattcgccaatggatatgccttttaacaaaatatcgcttggcgtcagttccgattgttctttatgaacgcaatgcgtaatgatggtccgcaggcggctttgaatcgtttccgataaccgcatgatcgtttcttttgcgtactgtttgctgctgtagctgatcgtaagcttcagcaggccctcggtgatcattccgtttatattcaatacatacggtctttcttgatttccgcttgagtctgaaccgcatgaataagaagataactggaccccatgctgctgtaaatcttggtcaaactgtccaaggtagttaaagctgatctcgggatttagtttcgatggcattccgccgcttaagtacctcgctattccatatccgatccctttatgcggaatttgacgcaatccttctttggtcgtcttgatataatcagagatttctttgcccggctgcgcgtgcagcacaaccggatacagacttgtaaaccacccgaccgtgcgggagatatctatatcttgtataatctgttctcggccgtgtccctctaaatgaatcggaatttgttccagtcctgaccaatgcgatatggaaagacccagagaagttaaaagcaaatcgtttatttccgtgtgataagcgcgattcgcttgttttaataagagctccgtttcctctttcgtccattccacagctgctgtttcactgtcttttgcagttgtatgggtttcatgaaaatctttaggcagcggtttgacttcggtttgttcgatctttgtccaatattcctgttcttgttttatggtttcactttgcgcatattctgacagtctcttagcccataattggaaagagtctgttttttgcgggaactggatcgtttgtccgcgttctgcctgctcatatccgcttgcaaaatcttcgagtaaaatacgccaggatactccgtcaatcagcaaatgatggatggcaatgagcagatgatctccatttgcgcattgaaacaacccggctttcattaacggcccatcacttaaacgcatactgctttgtatctcatcagccttggcttcaattgtacgccccggatcgggatcttctttcagattcaggacttctaagcggtacagcccgctttgggcgatttcttcattctgtgcctcacagccattttccgtagtccggaacgtcatgcggagcgcatcgtgatgttcagcaagcttttgcagggtttgacgaagctgcgtttcctgaaaaccttccggcgcatgcagcatgacggcttgattgtaataatgctgatctgttgttgtttgttcgaaaaaccaatgctgaataggagtcaggctgacttttcctttgacctcaccttgatcggctatacgcagattctgcttgatatgcggactcaattctgcaattgttgcatattgaaacaagtctttgatttccattttgtatccttgctgatttaatctggaggatacttgaatggatttaatggaatctccgccaagatcgaagaaattatcaagaatactgacgttttcagcgcctaataccgattcccaggcagaaactaatatttcttcagcttttgttcggggagctttatactctgctctgtcctgcagctcgaaattcggagccggcagcccttttctgtttatttttccgttagaagttaaaggcatttcatcaagctcaataaaataagccggaaccatataacttgcaagggtatgagacaattgtttccggagacgtgctgccgttgtttgcccgccgctcacgtaatatgcacacaattgtttaaacccgtggacatcctctctggctgtaacgacagcttccttgatcgcttcttcttgaagcagtgccgcctcgatctcgcctaattcgatacgatagcctctgattttcacttgttcatctattctgcccgcatattcaatgtttccgtccgccagccacttcgccaaatctccggtcttatacatcttcgctccgggttcaaacgggtcatcgacaaatttctctgccgttaattcgggacggttcaaatatcctcttgccacaccggcgccgctgatatagatttctcccgggacaccgatcggcgcgggtttcatattctcatcaagaacgtaaatgctcgtgtttgccgcagcggttccgatcggtactgattcccgcctgtcctttgcgggatcataacggtaaatcatgcagccgacaacggtttccgtcggtccgtactcattgcatatttcaatccggccttcgaactgttcatgaatgctgcgggctaaccgggtgcttaagttttccccgcccacaatcattcttctgacagccgtttgatcggcaatgttcatttctttcaaaacctgcaaatgggccggggtcaatttaatgatatccaccctcgggtcccgcacaatcgattcaagcagagctgttttatcctctccgtcatagacgatgattgcatttcctgtgacaagcggcgtgaaaatagaagtcaccgtcagatcaaaagaaattgacgaatacaatgggaagttggctttctcgccttttacataaacctctttcgcccaccaaatataattggtcaagcctcggtgctcgattagtacgccttttggccggcctgtggaacctgacgtataaatgacatatgccaaatggctcgcatcatttatcggagcaaggtcagagccatcttggtgataagaactttcatcatcaagtaaaaccgtgacgccttcataggcaagctgtttcctgacgtcccgctgcattaaaacgattccggcttgggagtcatccagcatataccggatgcggtcttgcggatattccggatctatagggacataggctccgcctgattttaaaacggcaaggattccgaccaccgattcgatgctgtttcttgtgatgatggctacaggctgatccgcctgcactcctttcgctcttaacgttcgcgccaggcggttggcccgcttattgagctctccgtacgtgagctgcctgtccttatcaatgacggctgcttgatcgggcgtacgctgcgattgctcttcaaataattgatgaaccggcgtctgcggaaacggcgcggccgtgtcgttaagcgtctgcagaagggttcttctttcgccttccgttaacaattccgcttgatccacccggatatccgcatctgtcacgacttgatgcaggatttgcatgaaatgttcccgaacccgctctatgcttgcccgatcatacacatttgcattgtattcaaaagagatgttcatctcgtcgcccggtataacggtcaaattaaaatcgtagttggtctgttcttccatttgtacgttggaaatcgtgatggatgttccgttttggcggcctatactttccatatactgatcaaccggataattttcgaatatcattaaatgtgtaattaaatcttgcttttgcgttgtacgcgcttgaatatcgtacagcgggtgcgtctcaaattgttgagacgctacagccctttcctgcgcctctttcataagctcagcaaacgttgtcccggcttcacatcggaaccggacgggaatggtgttaatgaataagccgatcatggtttccacgtttggaattccagcaggtcttccggatacaacacttccaaacacaacgtcccggctgcggttatatttctgcagcaaaaccgcccatgccgtctgcagcagcgtgttcagcgtgacatgatgcttgcctgccgtccgcttcattttcgaagtgagatcggagcttatgtcacacgtcactttttcaggaacgtatcgtccgtcttccgctgcatggtgatccttaggaaggccggtttgctcctcatatccctccaagtactgatcccaataagccgtggcctctttcgcatcttgccggccgagccattcaatatattgactgtacggagtaattgacgattgttcaggctgcttttgctgaagcaaagcaaagtaattctcgaaaatttcttttgtaatcagcggcagacaccagccgtccatcaaaatatggtggaaactccagataaaacggtatgttttttcatccgtacgaaggatgaataaccgcattaacgcgcctttttctaagtcgaacccccgcatcttatcttctctggcatactgctgaatcatcgcttctttttgtgattccttcacctctcgtaagtcattgaattgaaaaccgatttttttcgttttgaatatgatttggagcggctgatccttccagcctctgtaaaaattcgtgcggaaaatatcatatttttgcgataagccgtccaagctttttgaaaatgaatcaatttccagatctccatgcagatcaaacatcgtttgctgaaaataagcacctgaattcggatcaaataagctgtgaaacagcatgcccttctgcatcggcgttaatggataaatattttccgcttcgcctaattcacgcgtctgctccaaaagctgttccagttcgtcgattgagatgtcttttaacaggatgtcacttggtgtgagagaagtctgctgccggcttacgcaatgtgcaatgacttcttgcagactttctttcaacccccgggcaaattgcgccatagtagatctttcgtattgtttgctgctgtagctcagagtcagtgataatgtcccttcggcaatcatgccgttcaagtcaagcacggccgttctctcttggttttcgttcattgataaccctgtggaaaaaggcgagattcgcaaagcctgatgcttcaggtcttggtcaaattgtcccaaataattaaacgatatctccggattcagctgcaggctgtcggcttccgagtgcccggaaatatatttgatgatgctgtaattcattcctttgtcagggatacggcgcagcccttcttttacgatcttgatccgctgcgacaggttttttccggcttccatcctcaggacgacagggtactggcttgtgaaccatcctatcgtgcgggaaatgtcagcatccggaataatcggttctctcccgtggccttccaaattcacgacaatctcttccgtgcctgtccacttgtgaacagccagccctaacgaagtcagcagcagatcgttgatatccgtgttgtaggcgcggttcgcttgttttaataattgctccgtttcctcttttgtccattgaatcgtcacttcttcgctgtctcttaataacgctccttcgctgagagtgtccttaggcaatggctgaggctttatacttgaaagctcagtccaatacgcaatctcctcttccatatcggtttccgccgcatatttggacaattgatcggcccaggatggaaacgagtctgttttttgcgggagctggatcgtttgtccgcgttctgcctgctcataaccgcttgcaaaatcttcgagcaaaatacgccaggatacaccgtcaatcagcaaatgatgaattgcaatcagcaaatgatctccgtccggacattggaacaaaccgagcttcatcaatggccctttgtctaataccatgctgctttgaatctcattcgctttatcggcaatcgcttgagccggattggtttcccctttataattcatcacttccagatggaatagttcactttcatctgttcctgtaattcgcggagcgtatccatccggcgttttttcaaaaatcatcctcaaggcatcgtgatgcgacgcgatccgttccatcgtccggcgaagcgggccctctttaaagccttccgccgaatataacatgacggcctgattgtaatggtgtgcatgcggcattttttgctcaaaaaaccaatgctgtatcggggtcagcttggttccgccattcacttctccttgatcagccactctgctgaccggtgctacaaactgactaagttcagcaatcgaggggtgtttaaacaaatgcttcatatcaatcttgtatccggcttgatacaatctggatgacacctgaattgatttaatcgaatctccgccaaaatcaaagaaattatccaaaattcctatacgttctgcccctaatacttcttgccagatagacgccagcagttcttctattgtgttccgcggggctatgtattcgttttccgcccgcgtattttcgtcagcagcaggcaaagctttcagatcaatcttcccattggaagtgagcggaatgcgttccaaagggataaagcgggagggaatcatataattcggcagttcccgggataattcttctctgaactgcgcagcggtcaaagaaggctcgccgacataataggcatacaattgtttggccccgtctgcgtcttcccgcgcgacgactgcggcctcacgaacgttttccagattgaacatggctgcctctacctcgccgatctcaatccggtagccgcgaattttcacttgatgatcaatccgccctaaatattcgattcttccatccggcagccatctggcgagatcccccgttttatacatcttttgaccagggacatgcagatgctccacaaatttttcctccgtcaattcaggccgattgaggtagccgcgggccactcccgctcctccgacatacagctctcccggtacgccgatcggctggatttgatggtgcgctcctaaaatataagcttgatggttggccaccgggctgccgattgtgatctgttcatcagcggactgaacagggtgaaatgtagataccacgctgttttctgtcggtccgtattcattattgatccgaatgcgaggctgcagagaatgcagcttctcaactgtatctgcttccagctgctcaccgcctacaacaacatgctgaacatggatgaaatcctctctgttcatctgttcgatcatcgttttcagaagacggggagaagttgaaaaatgggtaattctttcttgttttatggcattttgaatggcgaaagtttctttattctcttcattaggcagaaggtgcaaagttgctcctgagatgagcgggccgaagaaatttaaaatgaacgcatcaaaaacatacgggtacaagacaagtacgcgatccgccggagaatgcctaaaaaacgccttcttccactgaagcgagttcacaatgccgccgtgttcaaccatgacccctttcggctttcctgttgtacccgacgtataaatgacataggctaaatggctgtgtcccgctactggtgataacaatgagcaatcggcatggtatgatgtttcatcattcaaatcaatcaccgggccgtcaaaggcgaggctgttttttaaatgatgctgaacaaggagaacgtctgcatccgcatcatgaagcaaatattgaagccgctcttttggatattcaggatccaggggcacataagcgccccctgccttccaaacagctataatggatacgatcatctctaatgaacgatcagcgagaatggcgactaacgtatcgggttgaaccccgcaattacgcaatgttcttgccaaacggctcgccttctcattcagttccctgtacgtcaaatggtcgtttttaaacttgacggccgcatgctcaggtgttctttccgcctgctcttcaaataattgatagactgttctgctcccggagaaatctctgacggtgtcgttaaaatcaaacaatagcttctgtttttccgcttccggtaagatctctgccgtatggatcgcggcttgaggctgaaacaggatcacagacagcagctgatccaaatgggatacaatttgattgatatagcgctcatcgtacagattgccgttataaaaaagcttcaaatgtatcccgttgttctccaaatcaaagtgaaacagcgtatcggttgcagtatcttctttacattgcatggaatgaatttcgttaagcgaaacgacggtatgaatcaaaggcatatgctcgtcattgtattgcacgctcagatgccggaccatttttctaaacggcaggttttgatttttcagagaatcattaacggcttctttcagctgcccgaatacggttttaaatgtgctctcgtttgaaagcgtattttttaagaggacaatgttgttaacggctgactggccggctttttgcttcgataccgttggaatgccaagaatcaggctcgttcgatccgtatatttatacaacaagcattcaatacccgccaataaaatcagataggccgccatatcggaatgattcgccattgtcatgattctttgagatacttccggagataaggaacggcagatgcatttttcctggtagccggtacgggccaacgacgctttatccgctgctttaaagtaagggaatgcgcttaggccgtcttcttcatcaaacaggttttcccagtacgtttcttgagttttaaataccgacattggagcacctcattttatatattttaaagaaataatgcttttccctaaaagttcaattgaatagaatcaagcgcgttctcttcttcctcattgctgccgctcaatccgatatgttcgattagaatgcttggctgttccaaaatcgccgataggatgtgtaagtagtcgtttgataaaacctcgattctgcttttcttaaacagttttttcgaatattcaaacagtccgtaatagttgtcgcggtccgcctgaatcgacaaggtcaaatcgaatttggcaaccgaatgatgaaatggatacggcttgagttgaagggaatcgaaaatcaattcagcatgatcaagattttgcagcacaaacatcgtatcgaataaaggattgcggcttgaatcttttggaagatgcagatgctgaattaattcttccaacggatagtcttgatttttataggcgttcagcatgttttcttttacttcgtttaagtaggcatcaaatgttttacggctcgccgggtgattgcgaatgactaacgtattgacgaacattcccacgaccggctctacatccagatgagtccgcccggcagatggcgttcctacgataatatcttcttgtccgctgtatttggataaaagaatcgtataggctgccaataaaatcatatacagtgttgctcctgtgtcttcttccatttggcttaaacgctgtttcaagtgttcgggtataagaaattcaaatgattcgccttcgtaatcgcgtatggcaggtcgctcataatccgcaggtatatccagtacaggaatatcaccgtgaaactgatccagccaatacgcttcctggctcttgatgttccgtttctgaaggtccgattgctgccaaactgcaaagtctttatattgaatagagagcgggcccggttcgttcccctcgtagattcggcttaaatctttcatcagaatattgacggacacgccgtcagaaatgatatgatgcatatcaaccacaagcacgtgccgcgcaggttcaatttcaatcagtccggcccgcatcagcggcggtttggctaagtcaaacgctttgatgaaatcaagcacacggtcttccgcctcttcttcgctagcttgaattcgttctatcgtaaagtcgacgttctgatgaatacgctgtgccggctcgccttcatataaatcaaagctggtacgcaatgcttcatgacgcgcgattaattttcggaaagcggcgtttaaccgttcgggatcgatcgtcccttccactttcatggcacccgtcatattgtaagtcagctcgccgccttctgtgtgacttaataaatacatccgcctctgagctgaagaaaccggataatatggcatttcctttgcagccggaatcggtacatatcgatttttgtccatgtgtaacgccttgtcagccaattgttcaatggtaggaaacttgaatatgtctttgagagacagattcacatccagctctttgtgaattctggcggctaaggcagccgctcggatggaattgcctccgagatcaaagaaattatgtttgatccccgcatggcttattccgagcacttccttccataaatctgtcagtttggactccgtctcattacccggcggaacatattcagctgtctgttgcagactcgcttctggtgcaggcagtgccttacggtttattttcccgttggatgttaacggcatatgctccagatggacaaaataggacggaaccatgtagtccggaagctccgatgacaattgttccctaagctgcgcagccgctataggcttgtcgcttacgtaatacgcgcataattgttttaagccgtctttttcttctttcactgtaaccgcggctttttgcaccgcttccgcgttatgcatcgctgcttcaatttcaccaagctcgattcggtgtcccctgattttgacttgttcatcaacgcgcccaatatatacaagatttccgtccttcaatcgcttagccaaatcccctgatttgtacattttcgctcccgggacatacgggttttcaacaaatttctcttccgttaaatccgggcggttccaataccctctggcaacacccggtccgctgatatatatttcgccgattaccccgatcggaaccaggtttctgcttgcatcggccacataaatatccgtgttggcagccggagtgccgatcggtacaaattcccgcttgtcccgttctgcgtcaaagtgataaatcatacatccgacgacagcttccgtcggtccgtattcattgaaaatgtccagccggcctttaaactgctcgctgacacttttggccagacgggtgcttaaattttctccgccgacaatcattttccgtattgcggtgccgccagcgatgttcatctccttgatgacgtgcagatgtgccggggtcaatttgatcatgtctattcttgagtcccgcataatctcagaaagcacagcgcttttgtcttcgccgtcaaagacaatgatggtatttcccgtaaccagcggcgtaaatatcgaggtcacagtcagatcgaaagagatggaagagtataatgggaagttggttttctcacctcttacataaacctctttcgcccaccaaatataatcagccagcccctgatgctcaatgaatacaccttttggatttcccgtggaacctgacgtatagatcatgtaggctaaatcatgcgcatcgctgtccggttcaagattcgagtgatcctcatggtatgagttttcctcatccaaaagcacaacgtcaccatcatacgggaattgatccagcaggctgcgctgtgtcaacacaacctccgctcttgaatctctcagcatatattgaatccgttcttccggatattcaggatcaatgggcacgtatgcgccgccggctttcagaacagccaaaattccgacaatcagctcgatccgatgcgggcagatgatggcaacgaattgatccgcttgtacgccttttgtccgtaacgtccgcgccaatcggttcgcccgttcattgagctgtctgtacgtataccgctcattgccaaaaataacggcttcatgatcgggactctgttcagcctgcatttcaaaccaccgatataccgtttccttatgcggatacggcgtctttgtgccattacactccgtcagcagttgatgccgttcggtttcagacagcataggaacggaagacaatgtcatctccggctgctcagcaaggctgtttaaaatggcggtatagtgtctggtaatctgttcaatggtgtcttttgtgaatcgtcccggtttataatcaaaatgcatctctatctgttgaccggcatcttcgatcgtgagcatcaaatcatacaaagagacccctggatttcgttctttcactttaaatgtacattcattgtgccggatttcatgaaattcaatgttttgaaacacaaacatcgtgttaaacagagactttccggttgtttcccgctgcacatttaatttctccacaagccggtcgaatggatagtcttggttttcgaaagcgtcaagcgtctgccgctttacttcttccagataatccgtaaacgttctattggcgtgcggcttcgtccggattccgatggtttgtatgaaaataccgatgattttttcgatatccggatgatttcttcctgatgcaggcgtgccaacgacaatgtcttcttgtcccgtatatttatgaagcagcacattataggcggccagaagcactgtatagagagtggtttccgccttttgcgccaaatcttgaagcgaacggatgacatccggctgtaaggagcatgtcacacgctgtccctcagaagaccgttctgccgctttggaaccgtctgtcggcaggtcaaggatgggaatttcgtcttgatattgttccagccaatatgtctcctgccgcttcatggcatcgtcattcagccgttggttttgccattctgcgaaatctttatattcaaattcaatgtccggtaatggtttctgatgatataaagccagcaattcatttgtaaggatgttgacggaataaccgtccgaaatgatatgatgcatatcgatgagcagttcggcctgctcgttttcaatcttgatcagctccgcacgaactaacggagcttgatccaggcggaacggttttacaaaccggtctgaataagcatcaaattcgtcccggctcattgtccggacatgaacgttaaaatcaactccgttttcaagtttctgaacgatatcgccatctataatgtcgaaatacgtgcgaaacgcttcgtgccgctgcatcacttgttgaagagatgagatcagggcctgctcatcgtacttccctgttattgatatgtggccgaacatattttgcgccagctgatccggttccagttggtgcaggaaatatactctttgctgtgccggcgatgtcgggtaatacgcttttttctcggcagccttcatcgggaggtgcacgactttcgtttcgttctgaatgaaacgtgctaattccttaacagtctggtgattgaaaaattgtccgatggaaaccttttgatgaaatgtcttctgaactttggaaagcataagcgttgcctggagtgagtttccccccagagccaggaagcgatctgatctgccgacccgttcaaggccgaaaagttcctcccaaatccgcgccagctgccgttccgtttcatttaccggcgcctcataggcttcagtaaaatttgccgtattgcttcctattgaagagatccgcttctggtgttcggcgtaaagtgcttgtaaatcatgctgttcttcatcggaaaacatcatcatggcgttaagagggattgaatctccctcaaccattttttgcagcaattttgtaaaacccgctccccactttttcatgatttccggactgatgacgttcgtattaaagtcgaaatcaagaacatattcttgatgcgcgtctgttatgttcagaaataaatcgtacagggtgcattttaccgggtatgcaacgggctccgcttccgcctttccgaaatgcagttttcgaaaaggcctgtctaaattaaagataatacgcatatccggcacttgatcgtgcggaagctctctggccaccagtgtcatcgggacggcttggtgccgcattgcaagattcacgctttctttcatactgccaagataaccggataaagtgctttctgaagaagacgtgttcttcaccggaatcatattgacgcaatttccaatcagatcatgctgtttcatatgcgattgacctgcagcggggatcccgatcacaaggcctgactgtttggtaagccggtgcagaaaaagatgaaatgcgcccagcatcgtcacaaatacgctatttttcatctgaatgcttaatgaccttaaagcctcgctcaatggccgtccaagcctgacggtacaccggtctccctcatacccgttcggataacggacagaagctgtgcttggcagaattggctgctgtatcggttcagaaaaatgacgccgccaataacggaccccttcttcataatggccgctgtcaatctgtgcctgctgccagtctaagtattggcgaaacgaaacatctgcctctttcggtgaaatcggtattccttgtacgattgccgcgtagctgctctccagttcttgaacaaaaacggcgattgaccatccatcggcaatgatatgatggaacgtgagcacaatcagatgttcattgtgagccgatgtaagcacatggattctaaacaaaggctcttgttcatggaaatgaaacggccgcttggcatcttctgtcagccatttttggatttccggctcccgatgttcatgcgggtgaccggtaaaatcaatgacaggtatatctatattcatccgttccagcacttgctgtacctcgtcatcgggatgaatcaccgtacgtaaagcttcatgacggtcaacgatatgccggacggcttgttttaatgatgtatactgcagttcgcccttcactttcagcataatggactggtttaaagcggcggaagcttcattcccgtaataggatgccataaccaactgcttttgttcaggtgaaagctcgcgcgtcccggactttttacggcctccgccatcaggggaatccgggccttccggaataaatccgcctcggcgaagatcctccaccgtgtctttcaccgcttgaataatattttcgatatcatccgcggtatgcgccgcagacaagaagcagttgcgtccctcccacacatagacccctttatagttgagatggtaaaagaacaagtcattatcaagcgatgagacaaaccggaataaagaaccgaatcgaaccatgcggataggcacttgcgcttgttcgaagcagcgattcagctcatcgaccaggtaggctgttttttgattaagctgctcatacagatgctctccttcggtttgtaaatggcgaaggacggctaatgacatcctcatggtaagcgggtgagtattgaaggtgccggccacaaacgtgcgtttcgcctcgtcttgcgggtaggaatcgtccccatactgccaggtacccccgtcgatcgtattcatgaactcagcttttccggcaactacccctaatggctgtccgccgccgatgatttttccgtaggtcactaaatcagcctgaatgctgaaccattcctgtgcgccgccaagaccgatccgaaatccggtaataatttcatccataatcagagctgttccggattgctgcgtgatcgcccgcaattctttcaaaaatgcctgcggctgcaaatccggtctgcggctttgtaccggttccaccagtacggctgccaattcatcaccaagactgcggatcacgtccagcgaatcgggattgttgtaatgtaaaataatcaaatcatccataaagctctgcagtatacccggagccagcggattcgcagacgcagccccgccttttgtgccggctacccctaatacgccgtcaaacgtgccgtgataagatcccgagaacgccacaactttctttcttcctgttgccgcccgcgccaaacgcagggcaaccatgacggcctctgttccggaattatagaaagcgaccctttccactccggtacatgtgcggatccggtcggcaacttcaccggcgacatctgacatcgggccgagcggaggcaatgatgaacgggttgaatcatcgataacctgtgtaataaaggaaggatgatgcccgaacaggttaaccccgaatcccatggtgatatcgatatattcatttccgtcaatatcccacattttagaaccgtcagaacgttcggcgataatcgggtatacgatttccttccaatacgaacggaagctggacaaattgcggttgtttgcatgagcaaatcgggtgttgtccgtatattgtttggaacctttcgttttatcggcgtatttcttgatgaaatcttctaagtattgtttttgccgtgcggtatagtgcccctgatcattcaggttctgaggctgaaaaggaacatagggtttcgcttcttgagccgctttcttttctgcagtgacggtcggaggcccctgcttgacagaaggaattgatttctcttgcgctttagcgtattctttctcatcggaatgatgtccgctgtttctcaacaaattaaagctatttaattgagcttgcaaggtatcctgaattaattgattctgagaagcgattattttttcgagcatatgctcttgatgaccttctctgcgatccgattcagactgcgcttctgaaatgacctgtatttcctgcgccggtacattctcttgaggcggagcggatgcaaaggacgatggaacggtatcagccaagtaatctatgacactttgaaggttggtcaacgtatcaaaaaaacgatccatcgggatatctaccccgaattcgtccgcgatggcttttttgacctgtgacagcatgatagaatccattccgagcccgataaaatgagcattcagatcgagttcctccgctctgatccctgaagcattgctgattacagttttcaggaaggatttaatgtgcgctttcgattgattgatattcaatgctgctcctcctttcttttcgccctcgtttaagcgcaattggtcagcttcagcccagcatcggctccgttcaaacggatacaggggcaatggcgtcttttgtacagtttcaccggaataaagcgcgcgccaatcgataacggctccttgcacaaataattcggctgcgcgatgcagccatgtgatccgttcatcttgcgtacgtaaacgctgcttaatcagagcggctgcttgttgattcagctcttctttatgagcaggcagcatttccttcatattcttgtaaccgatgtatacaccgggaaggtttctgtctccctgaatcaggcgggtcagcttatccgatagttcttgtttaccggatacaatcatggcaatgccatgatctaaatgagccctgcccgtagtggctgtatagcaaatggactttaatgaagcttggctgtcatccgatacatattgccggtactgctgtgcgagttcatagagtgatttttcagtatgagcggataaaacaaataggtgcggcccatgttcatcctcgggtgcatactcactttgagaaatatattcttccaataccacatgagcgttcgttccgctaaagccaaatgagctgattccgcctcgcagcggctcatcaccggatgtgaacgctgcagcttcctgattcacataaaatggtgatgtgtgaaaatgaatgagcggattaggttcattaaagtgcgctaacggcggatttttcttgtgattcagcatgaggacagatttgatcagcccgacgatgcctgccgcttcaaacaaatgaccgatgttcgatttaacagaaccaatcgcacaaaattgtttttttgccgtatacttttcaaacgctttacaaagcccgttaaattcaaccggatcgccgagcttcgttccggtgccatgcgcttcgatgaaagacagtgtttcaggggcaatgcccgcgtctttccaagccgtctcaatgacctcagtctgagctgccggattcggtgctgtaatcccggcggttgttccgtcttgattcatcgcgcttcccttgattacgccgtaaatatggtctccgtcgcgaacagcatcctgcaaaggttttagcaggactgcggccgcgccttcacctgtgcccgtgccgtctgaatctttgctgaacgttttcgtgtacccgtccgaagattccatatcaagtccgatacagatcggcaagagcgatgtccggataccgccggcaagagccatttcacaatcgccggacattaaagatttacatgccatatgaacggcggcaagcgatgaggagcatgccgtatccactgtgaccgccggcccttttaaatttaagaaataagcgattcggctggctagcacggaagggagattgcccacgatatattgatgaagttcctccggataattcgcagaaaggagacgttcataatcgtagcccaccttcgagtaccccgcatataccccgacacggctcccgttcatgctgccgccggcatagcccgcatcttcaatcgcatgccatgcagactgcaaaaacagtctttggttagggtccataaactgagccgctttaggagctaaaccgaagaacgaataatcaaagcggtcgatttcatctaaatagccgcccttcacaaactgactctcattgaactcgctttggatggactttaaataatccgccgcatctttcagccgggattcggggtattctcgaatgctgtgctcacctttttcaagcagattccaaaaatcacttttcgttgacgctcccgggacattgagcgacatcccgataatggcgatatctttcggtgtcacatggcttggtttcgctgccgcgtcctgtttgatttcagcccggctttcagacagatataccgctaaatcagtgatagaaggatacgtaaagagatctgaaacggcaagctcgcgtccgaatttctgttctatgcgctcggcaatctgcgataactgtaatgaatttgctcccatatcaaaataactgtcagcgaggtgaaccttttttccatcgagcacttcggaaaagatagacagcaattccgtttctatctcatgaatgggtgtctgtccggatgtttccgggctgctctccaaacattcattgatggcggcagactctgttgaaaaattccctgcctcatactgtctggcaagttcgtagcgtttaacctttccgctggttgttttagggagttttcggatcggaaggacttcttttatgctccagccgccccgcttgtacaaatgcttttttatctctttgacaagcggtgcgaatttttcaggtgattttttgtaaacaacaaagagcacgatttctccgctttgtgtcttttgatcatatacaccgcaggcggcaacccttcctaagtcaacctcttccatttcaatcgcgacccgttcaatatcgtgcgggtagatattttttccgttcacgaaaataatgtccttttctcttccggttacgactaagttaccactttcactaatgaatccgaggtctcccgtttttacccagccctcagaagtcagcgctttttccgtactctctgggttgttataatacccttgcgtcacattgtctcctttgatctggatatggccgatgattccgtcttctactctttcatttgtttcatcggagatccgaagctgacaatagtcaataggttgtcccacctcaacgaatgaagcgcaattttggtcctctttgctgacttttacagctctttcaccaagatttaaatagtcacgatgcaaataaacgggaacgaattctttacctattttagagaacgctgcgccaaccgaagcttccgctaaaccgtaaacattcaaaatggcggatcttttcagattgaatgctgcgcatcttttcaaaaattcgtcacacagctccggtaatatcggttctgcaccgtttgcgatgaccttgatgtgggataaatcccagtctggttcatttttcagaaatttaaggaagtagttgtacccgaaattaggagatgatagaatactggctttatgttcatgagcttttttcatccaaagaataggtctgcgaataaataactctgtaggcattagattttgattgattccggttatgaagggaacaaggtggcaggcgatgagccccatatcatgcgttaaaggcatccatgataagaaagagtctttcgaatgaacggctagggcagtcccaatggcgcacgtgttatgtattaagttgtgatgcgttaacatgactccttttggatctcctgtcgatccggaagaaaattggataaaggcgagttcatccgcatcaggttcataaaatgaagcggggtaatcgtaggtttgatcttgaatgatgtcagatttttcgtttaattgatgatggaaatcctgtaaatcgtgttctgcagcgtatttctttattttgtccaatactttttcagaggcaatcagaaacggatgatttaatatattccaaatgcgccagaccttcagtttatggtcatcatcttctccgatactgaccggcaccgggatcattcctcctaatatacaagcccaaaaagcaacgacaaatgatttgttttcttggatttgaaatacaatttcctgcttcggcttaatgccgagatgctgtaaatagccaagatacccttgcgcctcttcaaacaattggcggtaagagacaaccgtctcgtttttatcggattcgataaaacggatcccgcgatcagagatactgcttctttcccgaatgacatctactaaggtttggaattgactggtatacataggtcccctcctgggcgctttattttaaaatccgcaattcttcccaagccggaagctgtttagcttcacaaattaatttgcataaatggatcgaatgttcgagttcttgttctgaaagcacgtcttcatgccttttcattctctctttcagctcttggatttgcgtaaataatggcgtcgtcatagtggaataagccgctgaatccttgttgtaatttcgcgcaatgacggattgaatcatcaatttattcagttgttttttgcgtaaatggacaatatgtttctttctttccgttgaattggaaagcgggggaacatcagatgtctgtcctaagggataaggtacaatgtgattcgttgtttttctcagcagaccggctaagacattgttcggacccatttcgatgacttctatgactccatgtaaaagcaagtaatgcatcgattctgtccatctaaccggcatcgtcatgtgctgcttgagatgttcgctgatcgaatttccgctgctgtaagggcgcgcggtgacatttgaaatgatcggccatgcggcatcccggaaggaataccggtgtaaaacagtctggaattgttcggaggctgatcgtatcatcgaactgtgaaaaggcgcactgacattcaaataagtgtatgccgcacccttttcctccgccatcttgatgacacgttccacagcttgccggtgtccggaaatcacatgctgctgttctgaattcatgcaggctacacctgccggaaagtcttccgtcgatactttcgaacatatttcctgcaacgtttggagagagagctgtgtcacggcggccatcgtcccctgctgctggggatccgcattttgcataagaattccccgctcccttacaagtgtaacggcatcctgaaaagaaagggcgccggcacagacaagcgctgaatattcgcctaagctatggcctgccaggaagcggggcttcacccctatttcctgcatatacacttgaaaagcaatcacactgaccgttaaaatagcgggctgcgcgttcattgtctttgtcaattcattcatatctccgttaaaacacagtttttttacatccaaggagatcgcatcgctcgcttcttcaaacaatctctttgcgagcacaaaatcattccaaaattgtttgcccattcctacaaattgagacccttgtccaggaaataaaaaggcaagattgttcatgagattcctccgatcatattgaacaggggatacaatatcctacaaaatatccctttatctaacatcctagcatgattataacaaatgtgtatagaatactttcggaggagttattgttcgttttcacaaacgaattagatatatttattcataaaataaaacatgggggtttcgccgaaaatcagtcttaaagagagatgatgaaagccggcgtggagcctgttaccggctcttcttcacttcggacgcgctcttcatgtttcatatgttttagggctattggcattattgtgtcagaaattacatattttctgtttattgtaaaaattcatttgtatatctgtgaaggattgtaaactgattgcgcttaattataaatgtggtgcaagagatggatctggatggggaaaatccgcaaggacgaaatacgccgcagaacatgcgaatgaccctgcccggataccgattgacgcagtaaatcggcctattgagtgaacaaggttttcaggcataaaaaaacagccgttcagagcggctgtttttttaaaaagcataagaactattgagcggtatacccgccatccatgactacggcttgacctgtgaccccttttgctttgtcgctggccaaaaatacggcgtaatcagcgatttccttcactgacagcagccgtttttggggaacgagcggaaagatgacgtcctcaagcacccgctcgtacggtacattccttgttgcggaaatgtcctttaactgattgcggacaagctgagtgtccacatatcccggacaaagcgcattgacggtaatgccgtcagccgcgccttcaagtgcgccgactttcgttaaaccgatgacgccgtgcttggcgctgttatatgccgctttcccgtgaaaaccgatcagtccgttgacagacgccatattaatgattcgaccgaattgctgttttttcataatgggaaatgcatgcttcattgcgataaatggcgcagtcagcatgagacgaatgagccgttcaaactgttcggtgggaaattcctcgatgggcgcgacatgctgaatgcccgcattattcacaaggatatcgagacgtccgaattgtttctcgaccgtctgcagcatgtcggccacttgcttttcatttgttacatcgcatgtgatgctgactgcttcacagccttcatctttcagtcttgccgccgcttctttccccgcttgttcgtttacatcagagatgatgacggctgctccttcacgggcgaattcttttgcgatttcaagcccgattcctccggctgctcctgttacaacggctgttttttcaataagcaatgaatgcatgacggcacctcctcattttggtctgaccccgttttttaacgactggctgacagtaaaatgaccttctgttttctcaaagacctcctctattgttacaccttcctgcagttcggtgagcgtcatacggccatcatgaaaatcgaatacagccaaatctgtgatcagccgatcgaccacctgcctgccggttaaaggcagcgtacattccgttctcactttagattccccatatttattaacgtgctccataatgacaataatccgttttgctccgtggaccaagtccatggcgccgcccattcctttgatcatttttcctgggatcatccagttcgccaaatctccccgttcggagacttccatcccgccgaggatcgctacatcaatgtggccgccgcgaatcatggcaaaggattcggcactgtcaaaatacgaggctccctttacttcggtgatggtttcttttcccgcgttgatcagatcggggtcctccgttccttccgccggataaggcccgatcccgagcaagccgttttcagactgaagcaggacgttataatcattcggtatctcattggctacaagcgtcggcatccctatccccaagttcacattcattccgtccttaatttcctttacagcccgtttgatcattcgttttctgctatctctcattctgtcagcctcctttatcatgcttgccggacggtgcggcgttcaatccgtttttcatgaatcccgccgagcagcacgtgctgcacaaaaatacccggcgtatgaatttgatccggatcaagctctccggcatcgacgatttcttcagcctctgcaatcgtcactttgcctgccattgcagcgagcggattgaaatttctcgccgtctttctgaacatcaggttgcccagaggatcggctttccaggcctttacgatggcggcgttccctgtaatccctttctccagaagataggtgcgcccgtcaaatgtcttatgttcttttccctcggctactgatgttccgacgcccgcaggtgtgtaaaacgccggaatgcctgcccctcccgcgcgaattctttctgcgagcgttccttggggcaccaattcgacttccagctccccgcttaaaaactgccgttcaaaggttttgttttctcccacataggatgcgaccatttttttgatctgccggtttgcaagcaagaggcctaacccccaatcatcaacaccgcagttattactgacaacggtcaagttttttacgccgctgtccctgatcgcgagaattaattgttccggaatgccgcacaggccgaagcctcctgcgatgagggtgtctccgtccttgatcagtgcagcagcatcttgataagagtccatcacttttccttttcccatattcgtttcccctttctgttttggctacacaaggcccgtcagactgtaaatggcgatgatgacaaacacagcggctgttttaatgacggtaatggcaaagatatccctgtaggattggcggtgggtcaacccagtgaccgcgagcagcgtaatgacggcgccattatgcggaagagtgtccatcccgccggaggccatcgagatcacccggtgcatgacctccggcgggatgtggaatgtattgattgcttctgtatacgctgctgacatcgtgcttaaagcgatgcccattcctcctgatgccgatcctgtaatcccggcaagcgcagtggtcgtcaccgctccgttgacgagcggatcagtaaacgtctgcgatatgccactgctgaccattttaaagccgggaagcgccgcaatgatcccgccaaatccgtattcggctcctgtattcatcgacgccagcaaggcgcccccgataccctcattcagtccctctttcaaattgaagaggacttttttccaatcgaacaaaatcgttgtcatgattccgatgaacagtgcgagttctactgaccagatcgcagtgacggaggaaaggtcaatcttcccgaacgcttctagcccgagcggcgcaaaatcaaatccgtcagggtaccaatgcgggagccacatcgtgaagcatttgttcatgactcccacaaggataagcggaacaaaggcgagcacttgccgcgcggggctgggttgcggtaaaacaggcgtatgtgtttcattagccagactagaggattcctctgcagcggaaacttcagattgaaatccagcatagccttctccggcattggccgcttttttgcgccgggattctaaataaatcattccggccgtaagcacaaatgctgcaccaatcagtccgagccagggagcggcataaatgtttgttttaaaaaaagcggtcggaatgacattttgaatttgcggtgtgccgggaagcgcatccattgtaaatgtaaaggcgcccaatgcaatcgtaccgggtatcagacgcttgggaatatcagctttaataaataggtttttagcaaacggataaatggcaaacaccgctacgaagagactgacgccgctgtacgttaaaatcgcacccattaagacgatggcgagaatggctctttttgctcccacaagtctgacgattgtttttgcaatcgactcagcgagcccggatatttcaacaaccttgccaaaaacggcccctaaaagaaatacgggaaaatacagcttaataaatcctaccatcttctccataaatatattcgagaagaaaggaagtacgaagcttggatctgtcaggagcacagcaaacagcgcacaaatcggggcgaataaaatgactgaaaagccccggtaagccgcaaacatcagcatgcctaatgccaataaaataataacaatgtccacaaatccccctcttttctgctcaatattagtaagcgcttacaaaaaatcgagaaaataaagcaaaaaacatgccggttttgcacaggttctgaggctgaaaaaatgtgcatcatggtgaatgttccgttttggcgaaagaaagggagactcttgctgtattagattgattggctgagcagtgagtttttttagggatagtgagatggatcagagaggatttttgctttataaatatgtattcttttttctttcatttatttcctgcaagaggaaccgataaaatccggccctcctgcatggtcattcagccaatgacaaccgggagctctttgagcgacctaaaaccaatgagcttgcggtattcaaggcggtgtgcagccagccgaagcttaggtatccgctcaaacagtgtgagaattgcaatttgtgcttcgatgcgcgctaatgaggagcctatgcaaaaatgggcgttctttccgaatgcaacatgcgggttcggctttctttggatatccattttgtgaggttgatcgaatatgcttggatcgcgattggctgcccctaaaaggatatatacctgctctcctttttttatggtcttcccatttatttcgcagtcttctgaggcggtgcgtgccgtcagctgcgcggggctgtcgtagcgcagacattcctcaactgcagtttcaataagcgaggggttttctctcagtgcgctaagctgttcagggtgtttcaataaagtaaacacaccgttgcttatgaggtttaccgtcgtctcgtgtccggctatgacaagtaagatacatgtcgcgagcacttcctcttttgaaagctgttcctccataataaacctgctgatcaagtcttgtttagggtgcgcttcccgcttgtgaatcaaatctctgaaatatgacgtcagcctgcctgcggtgtcgcttgctctgactaacgtctttcttgatcgggtaagatcaatggcctgaatgacgtctgccgtccattgtctgaattgatatctctcctctttcggcactccgagtatctccgcaatgataaggcttgccaatggaaaggcaaactctgaaacaaggtccgcggtttttttgatttggacttgatccaacaagtcatgaaccgtttcttttatacaagggcgaagtgattccgccgtctttgcggtaaattctttaccgataagcatccgcatccgcttatggtctgattgatttttaaataacagcatatcgtgctggatatgcgatagattttgatatttcgttgaagcttccggaagaggaatgcggtttttaaaccgaatgtctttcagaatcgctgccgcttctttgtacccggtgacataccagcccggatattttaatacggttcctttataaacaggatcaatggatcgcagtttgtcataaaacgggtaagggtcattccaaaaatccgaatccgcatggagagacggatgtgcaatcgataggtctgccgtcatcttatacctccgtattgcaggcggattgcaggccggctttcatttcttcaacggattcgacttcaaaacctaaatcatggagcatttgatgatcctctgtttcttgctgccctgctgtcgttaagtaatctccgacgaaaatcgaatttgcggcgtaaagtcccagcggctgcagcgaacgaaggttgacttcccggcctcctgagatacggatttcttttgacggattgataaaacggaacaaggcgagcactttcaggcaatacaccggatgtaattcgcttaccccttctaacggagttccgtcaatcgcatgcagaaaattaaccgggatgctgtcggcgtcaagcgcttttaagctgttcgccatatcaatgacgtcctgtttcgtctctttcatgccgacgatgacaccagaacaaggtgacatccccgattgtttcgccgtttccactgtattgaccctgtcgtcatacgtgtgggaggtcgtaatgtttgagtgatttctttgtgatgtattgatgttatgattgtaccggtctactcctgcctgtttcagccgctctgcctgttccggcttcagcagaccgaggcatgcgcagatttttaaaccgtacgtttctttaatttctttgacagcatcaacaacttgatccacttctctgtttgacggtccccggccgctggcgacgatacagtatgtccctatattcaggtcgtgggcgcgttttgcccctttaagcaatatatgcttatccaccatccggtaagactcaatcggcgcttttgatattgaagattgtgaacagtacccgcaattttccggacacaggcctgattttgcattcataatcatattcagctttactttttttccgtaaaatcgttttctgatatgaaaagcggcatgcatcagcaataaaagatcctcatcaggacaatttaaaatggccagcgcttcttgattcgttacttccgccccgtccagcactctctctgcaagatccatccattgattcatgtttatctccccatttgtgtcagattcatgaaagaggaaacatctatatgtttctcaatcatgtgttgaatgttttccgatgaaacgtgatccagcttcggtgtgattcccaaaatcggaactttgcataatgtttcaatcatgctcgggtttgtcttttcgtccagccccggcctgctccttacgccgttgataataatgccgagaacctctatccccatgtttttcgcatattcaacggttaaatatgtgtggttgatggttccgagatcaggcctggccacaatcaccgccggcaattccatggcttttatcagatcactgactaaataattttcaccaagcgggacggaaatgccgcctgccccctcaacgatgaaacactcatgacgatttttgatcttactccagtgggccatgacatccgccatgctcacggatttcccctcaagcatggcggccgtgtacggggcaagcggctctttccattcaaatggcgtgatttcttcatgagacagtgcggtttgtgacatgtctttcaacagcgaggtgtcactttccggatgagttcgcggcacaccgcttaaaaacggcttaaacactccgatatccgcctgtttctgccggaatgccgcggcaagtccgcaagaaacgatggtttttccgacgccggtatctgttcctgtaacaaaaaaacttctcatttgtttatattcagctcttttctaatggaatcaaatgcttctgtcagctcgtctatgtcctgtaagctgcgatccgccgtaacggtcagcctgattctgctttcgccttccggaacagcgggcgggcggatggccggggcgcagattccctttttctccagcagtgcagcggctgaaaccgctgtttttgcatcaccgatgataacggggataatcggtgtatctccgcctcttacggtaaagcccatatcggccagacgcgtttttatcattttgacagacgactgcagctcacggcgcgtatcgtgcatatctgatatgatgtcaaatgccgtatgcgaagccgcacaaattgacggcgggagggccgtctgaaaaataaacgtccgcgcctgattcagcaaaaaatcaatgaaaatgtttgatcccgcggcaaaaccgccttccgttcctacagctttgcttaatgtgccgatgacaacatcaggacaaacaccgaaatagtcacttgttcccccgccgttttccccgagtacaccggttgcatgcgcgtcatctgctatcacaaatgcctggtactgctttgcaagcgccattatgcggtcaagaggcgcgatggtgccgtccatgctgaagacgccgtctgtgacgatgaagcggcggttccgagcctggacggaggcaagttttttctcaagatcagccatatcaatatggcggtacacgatggtttccgcttttgataaacggcagccgtcaacaatgctcgcatggttcagttgatcgcttaaaatgacatcgcctttttgaggcagtgaggcaagcacgccgatattcgccaagtaaccgcttgaaaacaataaagccgcttccgtctgtttaaagtccgcgattgtttgttcaagtttttcgtgccacacagtatttcctgtcgttaaccgtgagccgccgcttcccgctccgaaccggctcaacgccgtttgcgcggctgtgatcagccgctcatcttttgacaggcgtaaatagtcattggatgcccaggtctgccgcttttgccctttggttttgagagcggttccctgtgttcgcagcgtccgatacagcccgtctcttttcaccgcatcgagccttccgaggagccatccgtcaaaatccacggccggtcacctcggctatcgcttctttcataatggagatcatggcttgtaactgatcggttgtgctggcaagcggcggcagaaaggcgatgacgtctccgagcggccgtgtcagcataccaagctctctcattttcaaggacaccttgtatcccatccgcttttcaggcggataaggctgttttgtccccttatcctgcacaagctctatgccgcacatgaaaccgagctggcggacatcgccgacatgagggagctgcttcagatcatgaagaaattccgctgccgtttttgatttttcggcgacttgttcaacgatgcgctctgattcgaataaacgcagattttcaattgccgcggcacagccaatctgatttcctgtataggaatggccgtggaaaaatgttttcattttgtcgtagtcatcgtagaaggcttcataaatggcttctgtggcaaacgtcacagcaatcggcaaatagcctcccgtaatgcctttccctgccgccatcaagtccggctggacattttcatgctcacaggcaaacatttttccggtgcggccgaaccccgtcgccacttcgtcaacgatcattaacacatcatatgccgtacacagctttcgtacgcctgccagaaagccttcaggcatgacgatcatcccggatgcgccttgcaccatcgattcgatcgtaagtgcggcaatctcttcgtgatgctttgcaagcagctgttcgagcgcgagaaggcattcatcccggcactgtacggggtcaccgctttcagatctgtatacatacggaatcggggctttgtagctttcaaacatcagcgggccgtacacatggtggaagagttcaatggagccgacgctgacggctccgatcgtatcgccgtgatagccgttctgcatagaaataaacgtctgtttctcgggtctccctatgtttttccagtattgaaaggccattttcagagcgatttccattgcttccgctccgctgtcggagtaaaaaacgcgtgtcagcttttccggtgtgatgtctgtcagcatctcggcaagttctgttgcgggaacgttcgtcatacccagtaaggtcgaatgagcgattttttcaagctgtttttgaatcgcttcatccatttcttttttgcggtggccgtgtacattgagccatactgaagaaaagccgtcataatattctttgccgctgatgtctttcagcatgatcccgtttccgctttcaatgattaacggatcttcatcgtaatctttcatttgtgtgaaaggcagccaaagatgctttttgcttttttcaatcattgattgtttcatatgttctcctcccgctgaatgaatacaggctgcttctccaaaaaatggatacagctctccgtatctatggagccatctgtaaagaaaatccggcatccgctttcatctccggcattcttcatcttggcaatccgctgatatcccagcttctttgcggcaacgtagcctgttatgtaatcagggtcatccgaccagcacaattcagcaataatccccggatgtgcgcaaacttttgccgcgatggcatgtgcttcttttattcgtgaatgttccggcatgttgtgagtaaaagcccatttttgaaaatcatgtgacggccaatccattcgggatacccgcacacctctatttcctctgccgtcaatgcgttctcctgcccggatatcaaacaggaccgctcctcttgcttctgcatattccgcaatgttttcgtacgctttctctatcatgtgcgggggaatccccgccttttgcagaagcttgcgggcgattgcttgtccttttttcggcgtgtctgattgatggaaagcaaccggcaaaggggggatcgtttcgatcggttcattaatgctttcaagctgaatctgcataaaatcaggtatccctcttgagtgcgagaagcctttatgtaataagccatctactgcttcctgtaaaccgctgtaagtgatgagccgttctccgccggaaatgtgttttccgccctgctcatggggggcgtttcgggaagctctcattcttacgctgtaataggtttcttcccgcatatattcccctcctttctcttactttgaaaattaatgttaactaaaatgattaaaggttaacacttatacagaatattagtgtccctcgcggaatatgtcaacctaaaatacaaaaatgttaacttaatgagttttgcaaagccccattacgttttcatgttttgttcatattttagtaattgtttattcaacactgtccgctaaagtaatccatatcaacaaataggacagcgaaccgcatcttattatgaggggaggtcaccgttatgctgaaagaaaaagtaaagacagcaggccgtttttgcactgtaggcgtcggtaatacgctgatcgattttggtgtcttctttcttctcgccgcttgtcatgtcccctatcttccggcgcagatctgctcctattcggcagggatcatcaacagctatgtatggaaccggaagtggacgtttcgtgtaaaacgcaaggctgacgggaaagagatcatgcgatttctcatgattaatcttgccgcgtcgggaatcacctttttgctgctttacgcgtttcaaaaaggcggctgttcgctattggtgagtaagttcgccgccactatcggcggaatgatgatgaattttatcggaaaccgaatatgggtatttggagattcgctgaaaaacatacaggatcaggagtgaagatgaatgagaaaagtgagaaaagcggtcattcccgcagcaggtttaggaacgagatttctgccggcgacaaaggcgcagccgaaagaaatgatgccgattgtcgacaaaccggccatccaatatattgtcgaagaggccgcagcgtcaggaattgaagatatattgattattacagggagaaacaaacgctcgattgaagatcattttgaccggtcggcggaattggaattcaatctgcaggaaaaaggcaagacggagacgctgaaggaaatgcagcggattgccgatttggccaatattcattacatccgtcagaaagaaccgctcggattaggacatgcggtgctgtgtgcgaagcattttatcggagatgagccttttgccgttctattaggtgatgatattatggtatctgacactcccgctctttcacagctcatcgacgtctataaccaacacggcacagaaacgatcggcgtacagcccgtcgatcctgctgatgtcagcaaatatggtattatacagacggggcggcagagcggtcatgtgtacgaggttgaggatctgattgagaagccggctgttgaaaaggcgccctctcatattgccgtgatgggccgctacatattaacccctgctatttttaaaacgctgaagacggtcggaagaggcgcgggcaacgaaatccaattgacagacgcgctgcgcgaagtgtgccgcacccgaagcatttacgcgcgggagcttgaaggaagccggtttgatataggagataagttcggctgttttaaggccggcacggagatcgggcttctgcgggaagaaatgagaccgaaacttttagcttatttagaagaggtgttaaaaagagaatctgaagaaatcgtgcgttaaaaaataatttgtaaccattttgcttgtcaatcagtcatataattgggtaaaaagataaagaggttgtgaacagtgtgggcaattttattagtgaaatattatcctggctgacaagtatgggctatttagggattgcgctcggattaatgatcgaaatcattccgagtgaaatcgttctggcttacggaggctatatggtgtcagaaggcacgatcagctttatcggcgccattgtcgccggtgtgatcggggggacgatcgcgcagtgctttatttactggatcgcccgttatgggggacggccgtttttggacaagtacggcaagtacttacttctgaaaaagcatcatgttgatgttgcggaaaactggtttcgccgttacggcgccggcgttgtgttctcggcgcggtttatcccggtcgtcagacatgcgatctccatcccggccggccttgcgaaaatgcctctttccaagtttgtcatattgacgacgcttgccattattccgtggtctgtcattttcgtttatctcgggtatcagctcgggggacagtggaaagacgtagacagctatgccggaatgtatacaactccgatcattatattggctctcgtatttattgttgtttatttcgttgtgaagaaaatgagatcaagactgtgaaaaaagactgcataagaacggctgcgagccggatctatgcagtcttttttttatttaaaccgggtatacggggtgtttccggtgtgtgaatgtcagttgtttggacatgtaagcagtgaggcgtttattgagttcttcccgcaaggaatcagcaggaacaatgccgtcaatcaccatttcagaggcaagccggtaaaggttaatgtcttccttatattcatcacgcttttcttgaataaaagccggtctttcttcaggggctagcccgctgattttgtttgcgtagaccgcattcaccgctgcttcaggacccattacggcaatttgcgcagtcggaagcgctaaacagcagtccggttcaaaagcaggccccgccatcgcgtataatccggcaccgtaggcttttctgacgataacggaaagcttcggaacagtcgcttccgccattgcggagatcatttttgcgccatgcctgatgatgcccgcctgctcaaccttcgttccgatcatgaatccgggaatgtctgctaaaaatagaagcggaatatggaatgcgtcgcacaaagcgataaattttgcggctttatccgccgaatcgagaaataaaaccccgcctttgacacgcggctgattggcgataatgccgaccggctgtccgtgaatccgcgcaagccccgttattaattcctgcgcaaataacggtttaatctcaaaaaatgagtcttcatcaatgacacgttcaattaaatccatcatgttgaacggtgcgttttgatgtgccgggatgacatctgagagcggtttttcaaaagctttcgggttcttagatttgttgacgggcgctttttcagtataatttgacgggaaatagctgaggtatgtctgcgccatcatgattgcttcctgttccgtccgggcgaggagatcaccgcagcctgatacggaacaatgcatacgggcgccgcccatttcttcaagcgatactttctcgccaattaccatttctgccatacgcggggaacctaagtacatggatgcattgccctcgaccataacgacaatgtcgcaaaaggccggaatgtaagcgccgcccgcagcggaagggccgaacaataaacagatttgcggaatgcggcccgacagctttacttgattataaaagatgcggccggctccccttctgcccgggaacatgtcgacctgatccgtaattctcgcacctgcggaatcgactaagtacaagagcggacactgaagcttttccgccgtctcctgaatgcggatgattttttccaccgttttcgcgccccacgagcccgcctttacggttgagtcgtttgccatcacacaaacggttctgccgccgatggttccgatcccggtaacgaccccgtcagccggaagtccgtctgacatgcactcggcgaaaaaagcgtcttcaacggatatgccgtcatcgaataaaagcttcagcctgtctcttacaaaaagttttcccttcttttcgttgcttgcgtgatatttcgcggctcctcccttttcaatcgttttgctgcgtgtctgccgttctttttcgtaatccatccgagtccctccatgttttattttcctttgtattcagggggtcttttttctttaaaagcgcgcaggccctcttctctgtcaagtgtgggaatgacttgttcatatgcttttcgttcgatttcgagccctgtattgagatctgtctccagacccttgtttatcgcggattttgcttgtctgacggcgatcggcccattagcggcgatgcggccggccagtgcttttgctttttccataagttcatcggcttcacaaacatgctcgatcagcttcatgtctttcccctcttctgcagaaagtcttcggccggtatagatcaattcttttgccgcgccggggccgataagccggggcagtctctgcgttccgcccgctccgggaatgatcgcaagccctgtttcaggaaggccgaggcccgcccggctgacggctgttctgatatcgcaggcgagagcgagttcaaggcctcctccgacagcggttccgttcagcgctgcaatgaccggctgcgggagagcttcaatggattcggccgtttcaccgatacgcctgacgctttgcttaacttgttcatgattcatccccgctctttcttttaaatcagcaccggcgcaaaatgtgttcccggtgccggtgagaatgacacaacgaatggatggcgagtttttgatgtcttcaatcacacgctgtaaatgatcaatcatttctgaagacagcgagttggccgcatgcgggcggttcagcgtgatcagaccgattgtttcttgacagacggaatacaaaacgcaatctcccatggcttctcctttctcatttcgttctgaatgcctgcaggtttctgcttggcaggtctttgcctattttatccgcgatccagccggcggcataaagaagtttattcatgtccgtcccggtatcaatccccatttgttcgagcatataaatgacgtcttctgtggcagcgttgcctgctgatccaggggcgtacgggcagccgccaagcccgcctgaggaagtatcaaaggatgtgatgcccatatcaagagcgggaatgatattcgctagagccgttcctcttgtatcatggaaatggagtgcgatttttgaggcgggaattctcggcaaaagggcttcaagcacggctatgacctgcaaggggtttgccgcgccgatcgtgtcgccgagcgatatttcatcaacacccatttcgagcagggtgtctgaaaggcggatgacttgttcgaccggcacgttctgttcgtacggacagccgaacacagtggacagataagctctcgtcgccattttttcagcttttgcttcagtaataacccgcctgagctcttgaacggtccggtcaatcggtttgtttacgtttttttggttatgggtttcgcttgcagataaaaatacacatgcctgatcgattccgccttctgccgcatgctccagtccgatgaggttcggaacgagagccgcgtagaccgtatgttcagttctggcaatgccttttgcgacgtccaggctgtcacgaagagccggaatccatctcggatgcacgaaagatgtcacttcgatatagggaaggcctgtttttgacagcatattgatccactcaatcttatcttctgtatccacccacgccgattcattctgcaagccgtcacgcggtcctacttcattgatgcggacatgtttcggacagttcatgctgcacctcccgttttattgaagttcaatcaggacctctccttcatcagtgaaatcaccttctgattttttcacttctttcaccgtacccgctgcatcagcgataatcggaatttccattttcatagattccaagatggccacttcctgtccttcttcaatgacatcacccggcttcacatgaattttccacaggtttcccgccatttgaatttttatgacgctcatttggatgccccctcgttcattgtttgtaaaaaaccggttgttgcctcgcccttttcaaacacttctgaatgagcaatttttgtcagcagcggaatgttggttttaatcccttctacatgatattcgccaagggcggttttcagttgttcaatggcttgttttctcgtattcgccgtgacgaccattttggcaatcatcggatcgtaaaacggagaaatgacgcttcccttttcgacggcgcattcgtgtcgcactgacgggtgtcttaaaacggaaaaagacgagatggtaccgggagacgggtaaaaggtgaccggatcttccgcatagatccgcacttcaatcgcatgaccgcggtggttgatatctttctgcgagaaaggcagcgcctgcccagcggcaattttcagctgttcttccacaagatccagtcctgtaatttcttctgtcaccggatgctccacctgcagtctggtgttcatctctaaaaaatagatttgtttcttttcgtcgacgagaaattctattgtgcctgcattttggtagccgatcgattttgcggctttaacggcggtttcaccgagtctttgtcttaattcatcgtcaacaaacggcgacggcgcttcttctatcactttttggtggcgcctttggactgaacagtcacgttcaaacagatgaacgatgttgccgaaagaatctgcgagtatctgaatttcaatatgacgggcattttcaatgaccttttccatgtacattgcgccgtctccaaaaaaggaggcggcccgcttttgattgccttcaaacgctttggccagctcttcttctgaatgtacgatctgcatgccgattccgcctcctcctgcggacgctttcagcatgaccggaaaaccgatggcacgggcttcggctaaggcggagtgaacatcgggcaatggctctgaaacaccgggaacgatcgggacctttgctttttgcatcgtttttcgggcttcaatcttgctgcccatcttggcgatgatatcaccgggcggaccgataaatgtgatttgttcttttcggcaacgttcggcgaacaggctgttttctgacagaagcccgtagcccggatgaatggcgtccgctccggccgatttggcggcttctatgattctgtcgatatgtaaatagctttcatttactctcgatttaccgatcggataggcctcatcagccgcttttacctgcagcgcgtcccggtcggcttctgaatacacagctgccgaggggatgccgagacgtttgcaggtgcggataattcgtaaggcgatttctcctctgttggcaatcaggacttttttaaacaaatgtgaagcactcctttttcattaagttaacttgagctcttcaatcgttttttcccgcagcttgaatttctgaatttttcctgaggctgtcattggatattcatctgtaaacaaaacgtacctggggactttatagcgggcgatatgttctttgcaaaaggttctgatgtcttctgcggaagcggtttgtccgtctttgagcctgacccacgccgcggcctcttctccgtatttcggatcaggaacgccgacgacctgaacgtctgctaccgcgggatgccgatataacatttcctcaatctcgcgcggatagatattttcgccgcccctgatcagcatgtctttcagacggcccgtgattttgcagtacccgtcctcgtccatgaccgccaaatcaccggtatgcagccagccgtctttgtctatcgcttcttcggtcgcttcttgatttttataatagcctttcatgacatgatatccgcgggtgcagagctctccttgttcgccccgggcggcttctccggatgttccgggccgaacgattctgacttcgatatgaggaagcgcgcgccccgctgtttccactcttctttcaaatgaatcatccgttcttgtctgcgtaataacaggtgatgcttcggtctgtccgtaggcaatggtaatgtcggtcatccccattttgccgatcacttctctcatgacttccgccgggcatggcgagcctgccataatcccggttcggacgtgggaaagatcatattcagaaaaacggctgtcatttaggagggcgataaacatcgtcggtacaccgtgcagagccgtacaggcttcttgctccaccgttttcagaacggccggcggagaaaactgttcgatcggaatcatcgccgcacccgcggaaacacatgccagcacgccgagcacgcacccgaagcagtggaaaaacggcacgggaatacataaacggtcacatgaagtaagcttcatgcattctgcgatattggccgcgttatttacgatattaaaatgtgagagcatgacgcctttcggaaatccggtcgtacctgatgtatattgcatatgaatgcaatcatcctttttcaggctgtccatccttccgtcaagcgctgcatccgttacagcttcggcattatccagcaatgaatcccaacggtgcatcccgggcgggcttttatcaccgatatataacaccgtccgtaaaaatggataacgtttcgaacgcagcctgccgcgctcacaagttttcagctccggaatcagcttattcacgatttcaacataagatgtctgccggtaggaatccatgattatcaaggccgagacgtctgaatgtgccagcaggtaatcgagctctgcgatttgaaaattggtattaatggtgaccagaacggcgccgattttcgctgttgcaaattgcgccgcgagccattccggaatgttggatgcccatatggccacatgatctcctttttcaactcccagcttcatcagcccttttgcggtttgccggcataaccggtcaaactcggcatacgtataacgaaggccgcgctcagggtaaacaaccgcttcacgatccggaaaaagctccgcggtccgctcaagcagctttccggctgttaaatggataagttcagccatatgacctgccccccttccatccctgtcttagtaaacgttttcatttcacttcaaaagctgtcttgcgatgaccattctttgaatttctgacgtcccttcgccaatctccatcagctttgcgtcacgaagcatacgttcgacaccgcattccttcatataaccgtaaccgccatgaatttggatggcctgaaggcacgttctgacggccatttcagaagcatagagcttggcgaatgcagcttctttcgtaaatggcaggttttgatccttcagccatgccgctttaagcaccatctgtctggcaaggtcaatttccatcgccatatcggccagcttaaattgaatggcttgaaatgacgatatcggactgccgaactgcttgcgttccttcgcatatgacagcgacgcctccagtgcgccttgagcgataccgacagccagtgccgcaatcgagatccgcccgccgtctaatgtatataaaaattgtttaaaacctttttccggatcaccgagcaggttatcggcaggcaccctgacatcctccagcacaagctcggccgtatccgaccctctcacacccatcttgtcgtacggatttgtgatcgtaaatcccggtgtgtctgtcgggacgatgagagctgaaatgatcggttttccggcggagttctttcccgtaacggcggtgacaatgaccgtgcgggcgtaatttgcgtttgtgatccagcatttctctccgtttatcacatagtcatcgccctttttctcggcttttgtctgggttccgccggcatcggaacctgcattcggctccgtcagtccgaatgatccgagcgcttttcccgaagcaagcggaataagatgttcttgcttttgctgttcagtaccgaaatagtataatgggcttgcaccgagtgacacggccgccgcgtagctcagccccgtgctgccgcaggcttttccgatttcttcgaccgctgctgcatatgaaatggtgtcaccgcccgccccgccgtattcttccggaaacggaattccgagcagcccgagttcgctcatttttttaaatgtgtctatcgggaagacggctgattgatcaacctcatgggctttcggggcaatttcatttttggcgaaatctctgaccatttcgcgcaccatctgctgttcttttgtcagttgaaaattcattaaccttcctccttctgctgctttctacattttattaatgggggtctttattcattccatccaaatgaagtctgaacattcggactcatctgccgccaaaaaaactgacagcgccgcaactgtcagttttattaataatgctatttaaccgtccgttttgcggagggacggctctcatggtgaagcctgtcaacggaagtaacgaaataggtgcaggcttctttcgcccgaatatcagtatctgaaaatgtctgcgtccgtgacgatgtttttctgactgtatccactaaataaggctgctttcccttttctgcgcggtaaatggcgtaataagccgtttttttaccgttggatttcgcatcttcgatatagagtgtatggcctgaagcgttcttctccgcccgtttgacagccggtttttttaaagcggaatgtccgagccaaggcatctcaggaattaatgcgggccggctgtacatgtctttgatcaaacggttttttacatcgagcggattacggtttaaatcctttaaactgaaatgcatgctgccttttatccatgctgatcccctgttaagagcaatctgtcttccgtattcccccgggtcggcccaggccggatcagcgttgttgttgattttataagctgcctgcccgatatataaatgcaccggccgattgttcacttcttttccccaccaatccgctaagacgtcatatgccgccgctttaaatccgatgctccagtaaatttgcggtgcgatgtaatcaatgtatcctttttggatccattctctcgtatcagcatataaatcatcgtagttccgcaccccggcggccgtttcggagcctgtcgggtcatctgcggcatttctccatacgccgaacgggctgattccgaatttgacataaggtttttctcgtttgatggtttggttgatttcttttacaagccggttgacgttatcccggcgccagtcatcaattgatgcaaagtgagcttttccgtaccgttcgtattccgcctgatcggggaattcctgtccggcaattttataaggataaaaataatcatccatatgaaccgcatcaatgtcataacggctgaccacctctttgattccatccgttataaattgtcttacttccggaatgcccggattatagtacagctgttttccgtatgcagcgacccagtccggatgcgaacgcgcgggatgatcatctgaaagcgcattcaaatttgtgtgattcatcgtgatccggtaaggattgaaccaagcgtgaaattcaagattccgtttatgtgtctcttcaactaaaaaagcaagcggatcgtagccgggatttttgccttgtgttcctgtcagatactctgaccaaggcccgtaatctgatggataaaaagcatcagccgcaggcttaatttggacgataacggcgttcattcccatctcctgaacgtcatccagcagcttgctgtattctcttttttgctcttccggtgacagcccttttttagagggccagtcgatattggtgacagacgcgatccatacggctctcatttctctctccggctgagtgccgcttgcttgtgcggatgctgagaacgtaaagatgccggctgtcagtacaacggcaaaaaaccatatcatgctaaaacagcagcttttcatgtttttccccctctctgctttacggtattccgaagcattccgggcggtgaatcagaaagcctgctttgctcctctcagcctaaaagggaaagaaaaaagtcctaaagcgaatcaaaacgcttcaggactttttatgtttcatggcggcgagcacgtcaatgaccttcgttccgacgccgacacacgtttcaagaatggcctgcgctccggcgatggacaaaatgaaaataaccggatgtgcatagcggggccagaccaagtagcagataccgatcaatatggcgcaccagacgcccgcacaccaataacattgcagcatataaccgaatgcggaggaagggacttttttttggacggcgcgcccgttttgatcgacggttttttcttgctttataaagggttttcttatgaattccgtaatcttatcaaatacgatcaaatgggtcagccggtagctggcaagaataatcattacatacgtaagccaagataggttcgtcatctcaaagcctccaaaaaactggtttgattcccctatcttgccctctgtcatcctgaaccattctgccggatgttacagattccgcgccaagcgtcttccgctgtttgcaatgatgtccagtatgacctcagcattttgctgtgcaaaggcgggttcaaacatatctttatgggcgccctcgccttgatattcctgatagagtcccgttgtggcgccttcccatttcatcggctcggtcttatcactgtgctcttcctttataccggcctcgataaaatggaggtttgccgcgatttggccgtcatttatcagttccgcccagtacgtttgatagcgctctgtctttttgatgaccgcttctctgacggcttccgggacattttcggctgttgcgtttgttggctgcggcggcagtgcgtcaagctttctgtacgcgtctgcgataatgacgtcgctgatttctaagccgcgcttttccatcgcttttgccgcctcgaatgccgtattgccgcctgccgaatatccgaagagtatataagggccttccggctggatttccagcattttatcaatgtattgttccattctgctgtcttcttcaataaagttaaaaccgtacacagcagcccgttcgtttaatgccgccgcaagatctttaaagaaaatcccgaaacctgagataggcggaaaacagaataggttgcggcctttcggctggttcagtctgctgatatgctgctctgcagcttctgtcagtgtgtttgaatacagcttttcagccaattgttcaattgtcggatattcaaatatcatttcaatcggcacatccatctgctgcctggtcttcagctgatgaatcacttgcaatgctttcaaagaatggccgcccagctcaaagaagtcatcctgtatgcccagctccctgcagccgaggatcggcgtccaaatgtcgatcagctcacgctctacccagtttcgtggcggaacggcttttgatgacgtttttttccgttctggcgcaggcagcccgcggcggtccactttgccgtttgcggtaagcggcatacggtcaagcttcatcacatactttggaatcatatagtcgggaagcgacctggccaacagggatcgaatggctctttcttcaacatgtgcgcctgtataatacgcacaaaggattgcttcttgtccttcgtctgacacgatgactgccgcttccctgattccatcaatttcagtcaagcgcgcttcgatttcggccggctcaatccgcttcccgcgaatcttgaattggcggtcgatacggctgatgtatccgatgcttccatcaggcagccagtgtgccaagtcgcctgttttgtagatcttttcttcaggatgaaccgggtggctgacaaacgcttcacttgttaagtcaggcctgtttaaatagcctttggcaaccccgtcaccgccgacacaaagctcaccgggcacgccgatcggcgcaagtccgccatttttatcaatgatatacgcggttgaattgctgatcggttttccgattgggatcggctgagaaaaatcgtgcctgatttcgtaaaaggtagaaaatgtcgtattttccgtcggtccgtatatgttataaaggctgagattcggacagcggtgtctgaccttattgatgagcgccggggacaatgcttctccgccgacatataaggtgtgcaacccagaaaacatctccggatctgcctgggcgaactggttaaagagcgccgtcgtcaaaaacagaatcgtaatccggttggaagaaagataattgccgaacctctcaggggcaagcattgtcgagcggtcaaccacatgaagacatgctccgttcaaaagtgctccgaagatttcaaacgtcactgcgtcaaaaccgatggaccctgtcagaatgagacggtccgacatgccagccgacgtgtaattgctgtttgacacgagcgatacgacgtttcggttggaaatcatcacgcccttcggttttcctgttgaaccggatgtatacataatataggcaaggtcatcaggtgctgtatcggtattcagttttcccgcatcaggtgtttgtttttcagctgcagccgggatagagatgatgtgagaaaagtcaatgtcagtctcaattcctttttgcaccgttaacagctgtgctccgctctcagtgagcatatcggcgatcctgtcggttggcagttctgcatcaagaggaaggtacgtccctcccgctttcaatacagcgagaacagcgatgataaattccggtgagcgttcggccagaatcccggcaattccctttggcgccaaaccgttttccagcagggtgcgggcgaatgcagttgaccgttcatcgagctcccggtacgtcatcgtcagcccgccggcgtgaagcgcctgatggtccggggttttcttcacctgtcggctgaacaggctgatgatgctttcatctctttcataagttgttttcgtgtcattaaattcgccgattattcttgatttttccttttgtccgagcatcggaagccgatcagccggaaaatcgggattgaaggcggcgccgcgcagagcttcttccaagtgtccttttacgctctctatccatacttcgtcataaacgttcgcattgtagctgaatttgatgagcagctcatcgccaggcgctatgatgaggttaaaatcgtaacccgattgttccgaaacgttgacattcccgatccggaacggtgcatccgattccttttccgcgtctttcatctgctgctgaatcggataattttcaaacacgatgatatggtcaattaaatcctgtttcagctcagtctgcgattggatgtcagcaagcggatgatagctgaacgcctctgaatcaagcatttctttctgcaagcggcccagcagttctctaaagctttcgtcacccgttttaatgcgtaccggaacggtattgataaacagcccgatcatgctttccacgccgtcaatgacggaaggccgccctgatacgacggcgccgaatacggcatcatccgtccggttgtagcgctgcagcatcaggccccatacagtctgcataagaaccgcgagcgtagcgccctcttctttggcgatggttttcagcttgtccgtcaggttttgatctatagaaaacagcagctcttccttgcggtagcctttttcctggggacgggccgatattttcgggagtcctgagggtgtctcgcagcctgctaaatatcctttccaatactcagaagccgcgtctttgtcctgatccgtcagccatgtaatataagagctgtaaggctttgcgggcgccagtgtgacaggtgagcctgattcaatcgcccggtacatatgcatgaattcctgaaggacgatgccgaggcaccagccgtccataaggatgtgatggtggctccagacgcatacatatttttcgtcagccgttttaaacaaagaaacacgcatcagcatatccttttgcaagtcaaagccttttaagcggtcacgttccttaaatcgctgtaaatagatgctctgttccgcttcgtccaaatgtgtaagatcttcgcggtgcagccggaattcccgctcacgcagcacaacttggcgggggccgttcagctgagcgacatgaggtaaaaaaaccgttctgaaaatatcgtggcggctgatgacagactgtacgctttgctcaaacaattccggacgaagccggccttttatggtgaagacggattgttcgatatatgcagccccctccttttgcagaaaggaatgaaaaagcattccttcctgcattcggctgaggggataaatattttggatattttttgttttgtccatgtgttcctcccgctcggtttagtggaagctgagtaagtcggcaatatcctgcaatgcttcctcagtcagctcccgatcatcaaagtcactgacggtcttctccgtaccggttttgccgaggcagtgttccgacagtttcaggagataataccggcagctttcggacagccgttcgatcgtatcttgccggaagcgctccgtttcataggaaatgctgacggtcatccggccttttgccgcaatcgcgctgatttcaagtgactgctcccgtttccatgtatctgtcacatcatctccgcctcccaaaggagaaaactgaaacgcgtcaggctgttccgtttctgccgggttcccgccgggcgcatcgaattgtccgagataattaaagctgatctccggtgctttcccgaaagtcatcccggcaagcttcggcggtgttaaatatttgaggacgccgtatccgttccctttatccggaatgcgccgcaatgtgtctttgacggttttcaatgtgcgaatttcatattcttcaagaggttcataaactccgctccggaaaagcaccgggtaaatggaagtgaaccaccccactgtcctgctgatgtccgcacctgcctgctccgattggcgtccgtgtccttcaagggcgattttcaaagcgtgccgcggcgaccacttttgaatggcaagcacggcggaagccaaaagcacatcttgcgtatccgtattgtaggcgctgtgtacatctttcaacagggcgtccgtttcactttctgtcagagtgaaggataccgtgttccgtttttttgcaggagtttgagataaatctgcctgttcgtaaggaagactttctgtttcatagtgttcaatctcccgccaatactccgcctgctgaagaagctgtttactttccgcataatcggccagctgctccgtatatgttttgaatgacatggttttcggagggagtttgatttcctgtccagagatggcctgttcataagcagaagccaagtcttccaataaaatccgccatgatatcccgtcgacagcgagatgatggaccgtcagaaacaagtaatcttctgcttcagagcggaacagccccgcctgtaccagcggcccgttctctaaatccatgtttctctgaagctctgcgacgcggcgttttacaaaacgttccttctcatgctcatcgccttccatttctaatatggtcaggctgtaaagctgttcatctgcgaggtcagccggtctgttgaagaggagaagacctttctcttcgtcttttatgcagacaaggcgcaaggcatcatgatgtacggtaatggcttttaacgttttcctcagagcctcttcatctattgaatttgctctcgtcagcatgacggactggttaaaatgatttgcttccttcatgtcttgtgtgaagaaccatttgtgaatcggcgaccacttcacttctccttctgcaggagcttggctgaccggctgccgctctgtacggacataaggcgccagctccctaattgtcggccggctgaaaatatcttttacggcgatctgttttcctgcctgatgtaatcgggctgatacttgcagggctttgatggaatcgccgcccagttcaaaaaatgattgatccgcggcaatgttttcagttccgagcacttcgctccaaatcgcggacagctctttttccatgtcgctttcaggctcggtaaatgcctgtccggtgtgcgcttttttccgcggctcaggaagcgcgcggcggtcaagcttcccgttcggtgtgacaggcagtgcttcaagtgtttcaaagaacgccggcaccatataagcgggcatttcatttctgagcgcctgctgcacggtttcactttctgttccttcttctgtcacgatataagcgcatagttccgtttggcctgctgatgcggtatgagcggtgacggctgcttctttgacaccttttatgcctgttaaggcggattcaatttctttcagttccacccggtagcctctgattttgacttgctcgtccattcggccgatatattgcagcgtgccgtccggcagccattttgccagatcacccgtgcggtacatgcgccggttcttccggaacgggtcttggacaaaggcttgagccgtttgctgaggaagattgcggtaccctcttgcaagaccggaacccgagatgcaaagttctcccgttacaccgatcggctgcggatgatctccgtttaaaatataaacgtgtgaatgctcaatcggacggccgatcgtaatgttctcactttgttctatatgtcttgccgctgtagtggcgacgctgttttccgtcgggccgtactcattggcaagctccgtgtgtggacaaactgataaactgcggctgataatgttttggtcgacagcttctcccgctaatgtgacaattctgagagactctgcatcccccggctccagtacgtcaagcagtgtacggtacagtacgggaacaatgatcatgtgagtgatgcggtaagatgcaagatagtgtttaatagcaagaatatctcttgcttcatcttcggctaaaacggccgctttcgcaccggaaatcagcggtgtgaacatgcttgttacaaacccgtcaaaggaaaatgaaaagagctgaagaatcgtatctttctcattcagatcataaaatccgctccgccattgaagggtttggctgacggatcgatgttcgaccataacccctttcggcctgcctgtcgttcccgatgtataaatgatgtaagccaaatcttccggtgctgataatgactggaccggcgaagcatcctgttcttggatatcctccagtgcgagcacttcaccgttaaaacgatcaggcacttgttctatcgcaccgtgtgcggtaaggagaagcgctgtgccgctgtccgagatgatatattgcttgcgttcctccggatattcaggatctatcgggacgtaggctcctccggctttccaaaccccgaagactgccgctacttgttccggcgatcttggtatcacaatgccgacggctgcatcaggtccgatctgccgtttttgcagggctctggcgattttattcgaccagtcatctaattctttgtatgtgatcaatgtttccccgctgataagggccgcggcatcaggtgtttttcgcgcctgggtgatgaacagttcatgaactgttttttcaggcaactgttgatccgtcatgccgttaaagtctgaaagaatccggttccgttccggagcagtcagcatgctgatcgcttgtaaagaagtttccggttcacggacaatgtgttcaagcatcgtcataaagtgggaagcccagcgctgcattgtttctctccggaataaagacgccgcatattcaaacagaaaatgaatctgtcctttgccttcagaagcctgcagagtgacatcaaatttggaaaccggacgggacacgtccgcaggctgaatatgcaaaccgtccaacagcagttcctcatgctctatattctggacgacaagcatggcgtcaaacagcggattgcggcttgtgtcccgctgcacaccgagccgttccacaagctcttcaaacggatagtcctgatgctcatatgcctcaagcgccgcctggcggacttctgccaagtaatcggtgaaccgtttgtctcctttcggctccgttctgatggccagcgtgttgacgaacatgccgagaatcggttctaggtctttgtgcggacgcccggcaatcggcgagccgacgatgatgtcttcctgcccgctcaatcgcgcgagtaacgtattgtacgcggcgagaagcaccatatacaaagtggagccgtgatcccgggcgatgcggtgaaggccggatgccgtttcagcgtcaagcgtgcacgatacgctgccgcccgcaaagcttctgaccgccggacggggcttgtcagccggaagctcaagcaccggaagctctccttcaagccgcttcagccaatacgcttcctgcttctggtacccttctttctcctgaaacgaccgctgccagacggcatagtctttatattgaaggcgcatcggcgcaagcgaacggcctgcgtacagctcgccgaattcttttatcaaggtgttgacggacacaccgtcagaaataatatgatgcatatccgttaataaaagatgacgttcgtccgattctttcacgagggccgcacggaagagcggcgcttcttccagacaaaacggccggacgaatgcgtcagctgactcggcctcatccagctgaaacggcacgctgtcatggatgcgctgcaccggttcgccgtcaggccccgtttcaaaggacgttctgagcgactcatgccgcttaacaagctgccggaacgtctcctccagccggccgcggtcaagcgggcccgtcagttccagcacagccggcatattgtagccgacaccgccgtcttcaagctgctggagcacatacatccgtttctgcgccgaagacaccgggtaggtgtcctgtgtttgcgcaggctgaatcgcttcatacgggctctcttccaagtcctgaataaccgaagcgagctcttccaccgtcggccgggcgaagatgtcctgtaacggcacctgaacaccgaactctttggcgatgcgggagacgagagccgtcgcttttaacgaatggccgccccgctcaaaaaagtgatcccggatgccgacggggccgtttttcagcacctcttcccaaagggcgcaaagcttcatttccgtgacgttccgcggggcggtgtacgcccgtctgtctgccgctccgccgggagccggcagtgcgcggcggtcaagttttccgctcggcgtgaccggccattcgctcatctttatgaactgagccggcatcatgtaggccggaaggcgtgtcgcaagctccgcccgcacgtcatcgctttcccgtccttcgatataggcgtaaagcgcggtttcgccgtgttcggtccgggcggtgaccgccgcctcacgaatgccgtcgatgcgccggatcgccgcttcgatctctcccggttcaatccggtagccgcggactttcacctgtccgtctgaacgtccgagccattcgactaggccctcttctgtccagcgtgcgatatcgcccgtctgatacatgcgctctcccggataaaacggatcatcgagaaaacgctcctccgtcagctcaggccggttcagatagccccgggccacccctgtccccgcgatgtacagctctccgatacagcccggcggcagaagccgtatcttttgatttaaaatatacagccgcatgttatgcccggaaatgccgatcggaacattgtgaaattcttttccttgcggcaaatcaaagtacgccgcttctactgtcgcttccgtcggaccgtaggaatttgtcaattccgttcccggcagaaggtcataaaaacgggaaaccaggtgcgggcccaattgttcgccgccggcaaaaaccctttttaagcaggtttttttgatcggctgttttctggaatttatatattccaagaaagcatgaagcatggatggcacaaaatgagccgccgttatgcggttattctccaatgcgttcagtatcatttcagggtctttctcgccgccttgcggaaggaggaaaacagaagctcccgcgatcggccaccaaaacagctcccaaatcgaagcgtcgaaagagtatgatgttttatgcaaaatgatgtcagaatcacttaatccataacgcgtttgcagtgagtataaaaagtttacggctgaccgatgttcaacctgcacgccttttgggcgtcccgtagaaccggatgtatagatgatataagccaatgaatcaggttttaccggaacgttagggttggccgcagcttcagggtttcctgtttgtccgcttttcagagagatcgtttctccctcaaaaagatctggtgcggaaagttctggttctgccagtaagaatttcacgccgctgtctttcagtaaaaagcgaatccgctcttccgggtaatccggatcaatcggcagatatgcaccgcctgcttttaagacagcgtaaatgccgatcagcatgtcaggagaacgccggcccataatggcggttttatcctccagccttatcccgcgcttgatcagctgatgcgcaagctcgtttgccctttcgttcagttcctgatacgtaatcgaaatgtcatcagttaaaattgccggacggtccggcgttttttcagcctgatgttccagcagatcatgaagagactgatgaagcggaaacgctgttttctgcaaggggctgaaatcttgaagcaaagacacttcttctttttctgtcaaaacagaaatatcgtctaattccaagcccggatcagccgcggcgttttcgacaagtgtcgtaaaaaatcccgcccatttttgaatcgtttttctcttaaacaaatcggtgctgtattcaaactggcagtataattcaccggcgttttcagagatgtacagtgataagtcaaatttagaaatcggcaggctgacgtctgccggctgcagttcaagtccagctgccctaagcttctgctgttccatattttgcagcgcaaatgttgtgtcaaacagcggatttcgggacatgtcccgcggcacaccgagcttatcgacgagctcttctaacgggtaatcctgatgttcgtaagcctcaagcgctgtttggcgaatttcctttaaatattctttgaatgtcatgcttccgtcgggacgcgtcctgaaagtaagcgtattgacaaacatgcccagaacggcgtcaaggtcggcatgaggccttcctgcaatcggagacccgacaatcatatcttcctgtccgcttaaacgggctaacagaaccgtgtacacaccgagcagcgtcatatacagtgtgcatttgttttctttcgccagctttttcaactgtgctgtatgtttttcattgatgacaaatgacacccggtcaccggaaaagctccgcaccgggggacgcggcttatcagccggcaattcaagcacgggaatctcaccggcaagccgattcagccagtactcctcttgtttccgatatgcggcgcccgccataaatgattgctgccagacagcataatctttgtattgaatccgtaacggcggcagacttctctcagcatacagctcactgaattcacgtatcaaaagattgacggatacgccgtctgaaataatatgatgcatgtcagctaaaagcagatgccggtctttttctatttggacaaatcctgcccggaaaaggggcgctttgccgagatcgaacggccggataaacgcttcggctgattgttcttttgtaaatgcaaacggcacgtcgtcatgaatcctctgcacaggcaggccgttttgttcttcaaaggacgttctgagcggttcatgccgccggatcagttccttgaacacggcttccatcctatctcggtcaaacgggcccttcacctctaaaacggctggaatgttataactgacaccgccattttcaagctggtgaaggacgtacatccgtttttgggcggatgagacaggatatgtttctttcatttctgtcttttctatggatgcgaacgggttctcttctgcttcactgatgattttggcgagttcttctacagtcggatggctgaagacatcactcagcgggatttgcacactgcactctttagctatttttgcaacgagtgccgtcgcctttaatgaatggccgccaagctcgaaaaagtgatcgtgaacgccgatcggtccggtttgaagcacttcttcccatatgcgggtaagcttcagctcggtcacattccggggagctgtatattgacggcccgctgcgtatgccgaagcttccggaagggcccgctgatcgacttttccgttcgcagtgagcggaattgagtcaacaaaagcccatttgaccggaatcatataatcaggcagctctttagccaaatcacttcgcagctgagaaggatcagtcgcttgtgagacgctgcagtaggcgcataattcattttcgccggactcattcgtttgaatcagaacagcagcttctttcactgcatgatgatttgccaggacggtttcaatttccttcggttcaatccggtaccctctgatcttcacttgatcatctgtccggccgatgtattcaatttggccgtccgcacgcagtcttgccaaatctccggtccggtacatgacggcgtccgttctgaacggatccggcaaaaatttctcttcggtcagcgccggattgttcacatagcctcttcctgtattcgccccagaaatatacaattctcccgcaattccgagaggctgaagctgcctatttttgctgaaaatatacatcttgttatgatggatcggtttcccgatcggcggatgttcaggtatgtcatctcccgcagaaatcgtatacgttgaaaccacatgagtttctgacgggccgtaatgattatgcaggtgcataccgtgtaaacggagcgtctgcctgaacaaacgcgaaacggtcagctgctccccggccgtaatgacatgcttcacacagcggggaaaagactgtgcataaccttcttcattgaaaagcattttgacaaacgcagtcgggaaaaacacaacttccgtgttgtgctgatcaataaacgaaaacagctgagaaacgtctcgtttgattgattcgggcacgatacaaagggtgccgccgctcaagagtactgaaaataactcctgatagcagacgtcaaacgccacagatgcgtactgcagcacatttgtgcaaaaatcaatgtctgtgttcgtcaattggtgagaaagcaggttggccatatttttatgttcgagcagcacacccttcggtttccctgtcgttcccgatgtataaatcatataaaggaggtcgtctgccgtattaatggattgcacattgcttccgtccgcttccgtcccggcctcttctatatatgtaacctgcagcgtttgttccgcggggactgattgatgccgctctgttacaacatggacgcagccgctgttttcaatgacatatcgaatacgctcctttggactgcccggatctatcgggacaaaggcgccgcccgcttttaaaataccgagaacagccgccgctaaagaaggggaacggccgagcatgacgcctaccggttcctcccgctttaatccgcgcttttgcagcaggcgggccagcttattagccgattcgttcagctctttgtacgtcactgactcgccttcataccgaatcgcgatttgatccggcgtttttgcggcctgccgttcaaacatcgcatgaaccgtgtcatattcaggcttttcggtctcttcagaaatcggtgcgagcagctgcgctttttcctctggggttatgatttcaagcttgtccggcgtgatgtccggtttgtcgagaacttgggagacgatatgtgccaaatggcctttgatattttcaataaattggcggtcatacatgcttgaatcgtatctcattttcaaatgaatttcgtcacccggcgccaccataagataaaaactgtaattggtttcgtcttccatgctgaaatcatggatgtgaaaaaggtctttcgtgtcccccttgctgttcagcacatcaagctcctgttcaaccggataattctcaaagacgagaatgtggtcaattaagccttgttttacctgtgaattcgcctgtatgtcataaagcggatgatagctgtatgcctgtcctttcaaagcgttcttttgcacgtttttgatcagcttttgaaacgggatgtttgccccgctgatccggacaggcacggtattaataaacaggccgatcattcgctcgatgccttcgatttcagacggccttccggaaatgacagaaccaaaaaccgcatcttctgtctggttatacgcctgaagcaaaatgccccagagcgtgtggaaaatggtgctcagcgtgacctcttcttttacggccagctctttcagcttagccgtgtcctcttttgaaaaggaaaacgtcacttcctcttgtctgctttcgccggcttttttctgcttcggcagaacagtctgctgctcaaagccttcaaggtaccgctcccagtacgaagcggctttttctttatcttgctccatcagccacttgatgtaggtcccgtacggcacagcgggctcaagcgttaacggtgtccggcggagccgcgaggcgtatatctggaagaactctttcagcacgattccgagacaccagccatccataatgatgtgatggaaactccatatgcacgtatattcacattcaccggtttgaagcagcgtcacccgcatcagcatgtctttttgcagatgaaatcctttcttacggtctcttcgtttggcttcttcaatatgcttgatttgatcagccttgtttaaattggtgagattttcctcaatgatgctgacgttccgctcttttaatacgacctgctgcggcactgacacgttctggctgataaagatcgttctgaaaatatcatgtctttcgaaaagggcatgaacgctctcttcaaacacgcgggtgtcaaccttccccgttattgaaaaggaggcctgctcggcgtaagcctgtgattccttttgcaggagggaatgaaaaagcattccttcctgcatataagacagcggataaatatcctgaattgcattcttttttgtcatgttataatctccccgtcgcctttttctacagttcctcgacaaaactcgctatgctgtccaaatcatcagatgttaacgttttgctgctaaaatcactaacggttttttctgcttcctctttgcctgtgcagtgcgccataatatcacgcaaatattgctgtaaagtttgcagcagctgttccatcgtttctttgcggaagcggctcggcggatagctcaaactgaagtgaagtttgttttgtgcggccatcgcgctcatttccaccgcttgttcccgctgccatgtcggcgtgatgtcgtgcccgcttgcaagaccggacagactgaacgtgtgctgatcttctgtatcattgaattgccctaaatagttaaagctgatttcaggcgcttgtctgaagcggattgttttttgttcaggcggtgtcatgtattttaaaatgccgtagcctattcctttatccggtattcttccgagtgtgtctttgaccgtttttaccgccgttccaagctcagcgcctgctgtgttcaagtcaatgagcaccggatacatggaggtaaaccagcctacggtgcggctgatgtcgagctccggcatgatgtgctctctcccgtgcccttccatcgcgatgcgcagtctgccgccccctgtccagtcccgtaaagccaaagctgcggcagtcagaagaatatcttgcgtatcggtatggtaggcccggttgacctgctgaagcaaaacggacgtttcttcttctgtaagcgtaaagcttaccgtttgccgaatgctgtcggctcccgtctgatgctgcggtttttcataaggaagttcggcagctgtttcttcttcaataaaacgccaatattcttcttcacgcatcagcttgctgctttttgcgtattctgaaagcctttcagcgtattgcttaaacgaatcggtctttggcggaagctggaccggctgaccttttacggcttgagtgtaagcggcagataaatcctccagcaaaatacgccatgacactccgtcaaccgccaggtgatgtacggtgatgaataaataatccccggaccgggttttgaaccagccggcttttaataacgggcctttttcaatatccatccgctgttggagcgcagcgacttcactttctatttctttttcccaagtatctgtctcagacagatcccaaatgtccaagctgtacagttcatctttttgaataccgtgattgatttgtctgaaactttcgttttctgtactgacggtgatccggagtgcatcatgatgaatgacaagatgctgcaaggcttctttgagcggctgtttatgcaatgcgtcagagctgaacatcatgacggactgattgaaatgatttctgttttccatccgctgtgataaaaaccactgctgaacgggtgtccaaggaatgtttccttccaccggccgctgatcgatgactctttccgctttccggataagtggcgcgagctccttaatggacggatgccggaataagtcactcgccgtcattttccacccatagcgtccgagccgtgcggaaacttgcagcgctttgattgagtcgccgcccaattcaaaaaatgagtcctcaatcccgacttgttttgcgccgagcacttcctgccagatcacggaaagctgttcttcgagctcattgcggggagctgtgtacgcggtttgaagcgcgagctccggttcgggcagatttttccgatccaatttaccgttcggcgtaagcggcagcttctcaagttccatcatataggccggaaccatgtaattcggcagttgctgagaaagtgaagaacgcactttttctgtatccatgtccgcctgcagactcatatatgcgatcagttctttattgccggactgcccggttctgactgacacggcggcttctttcacgccgtccaggctcctcagtgcggcttcaatctctcccagctccacccgataaccgcggattttcacttgatcatccatccgcccggcatattcgatcgttccgtccggcagccagcgggctaaatctccggtgcggtacatccgttctccgggaacaaaaggattagggacaaatttttcttccgtcagttcagggcggccgaaatatcctcttgccacaccgtctccgcccgtgcataattcgccgatgacgccgatcggctgcggtgttcccctgctgtttatgatatatgcggttgaatttccgacagggcggccgatcgggattgaatgatcgtatgattgttcaatcaaaaagcaagtcgagaacgtcgtgttttcagtcggtccgtatccattccatactgagagttgcggcagcgcactccgaacccggtttacatggcttggggacagtgcttccccgccgataatcaatcgggataatccggaaaacacgtgttcattttgttctgataaatggttgaacagagacgatgtcagccacagtgtcgtaatgccgttttgctgtataaatgtttccagaacatccgagtcgagataggtttcctggtcacttacatataaagaagcgccgtttaaaagcggaccgaatatttcaaatgtcgtaacgtcaaatcctaatgatgaagtaaacaatagtctgtcttccggcgtaaaatcaatataattgctgtttttcacaaggcggatcacgcttcgctgttcaatcatgacgccttttggcgcacctgttgatccggacgtataaatcatgtaggccaacgattcaggtccgccgagcggttcgggattttctgaactcaagccggcctttgtttgaatatcctctatgaataaacgttttcctgaaagcggcagaccgtcaagtttatcagattggagaagaatatcagctttacagtctttaagcatccattcagcccgttcccgcggcacatcgtcaccaataggcaagtaggcgcctcccgcttttaatattccgaggattccggaggcaagctctgttgtgcggccggttaataaggcgacaacgctttccggaccgacgccatttgatcggagagccgccgctattctgttagcccgttcgttcagctcacggtatgtcaagatttgtccatcatatacaactgcccgggcatcgggggtttcttttgcctgccgctcaaataaacggctgatggtttcgtgtcttgggtaatcgcttttcgtctgattaaactgataaatgacgcgatttgtttcagcattatccagtacgtgaatgtcaccaagcggtatcgcttggttttcaattacttttgtaagaatacgtgtaaaataacaaagccatttttcaattgtctgtttttgatagatatctgtattgaattcaaaatcaaagctgatggaaccgtcagacccttctgacgcgtaaagcgtggcatcaaactttgcggttttatgacttgtatccgcagcttgagccaaatgcagcttatttaacaccagggattcacgctccatattttggagcacaaacataacgtcaaacagcggattgcggctcgtgtcccgctgcacaccgagccgttccaccagctcttcaaacggatagtcctgatgctcgtacgcttcaagcgcggcctggcggacttccgccaagtaatcggtaaaccgtttgtctcctttcggctccgttctgatggcgagcgtgttgacgaacatgccgagaatcggttcaaggtcttcatgcggacgcccggcaatcggcgagccgacgatgatgtcttcctgcccgctcaatcgcgcgagtaacgtattgtacgcggcgagaagcaccatatacaaagtggagccgtgatcccgggcaatgcggtgaaggccggatgccgtttcagcgtcaagcgtgcacgatacgctgccgcccgcaaagcttctgacagccggacggggcttgtcagccggaagttcaagcaccggaagctctccttctagccgcttcagccagtaggcttcctgcttctggtacccttctttctcctgaaacgaccgctgccagacggcatagtctttatattgaaggcgcatcggcgcaagcgaacggcctgcgtacagctcgccgaattctttaatcaaggtgttgacggacacaccgtcagaaataatatgatgcatatccgttaataaaagatgacgttcgtccgattctttcacgagggccgcacggaagagcggcgcttcctccagacaaaacggccggacgaatgcgtcagctgacccggcctcatccagctgaaacggtacgctatcatggatgcgctgcaccggttcgccgtcaggcctcgtttcaaaggacgttctgagcgactcatgccgctccacaagctgccggaacgtctcctccagccggccgcggtcaagcgggcccgtcagttccagcacagccggcatattgtagccgacaccgccgtcttcaagctgctggagcacatacatccgtttctgcgccgaagacaccggataggtgtcctgtttttgcgcaggctgaatcgcttcatacgggctctcttccaagtcctgaataaccgaagcgagctcttccaccgtcggccgggcgaagatgtcctgtaacggcacctgaacaccgaactctttggcgatgcgggagacgagagctgtcgcttttaacgaatggccgccccgctcaaaaaagtgatcccggatgccgacggggccgtttttcagcacctcttcccaaagggcgcaaagcttcatttccgtgacgttccgcggggcggtgtacgcctgtctgtctgccgctccgtcgggagccggcagtgcgcggcggtcaagctttccgctcggtgtgaccggccattcggtcatctttatgaactgagctggcatcatgtaagccggaaggcgtgtcgcaagctccgcccgcacgtcatcgctttcccgtccttcaatataggcgtaaagcgcggtttcgccgtgttcgttccgggcggtgaccgccgcctcacgaatgccgtcgatgcgccggatcgccgcttcgatctctcccggttcaatccggtagccgcggactttcacctgtccgtctgaacgtccgagccattcgactaggccgtcttctgtccagcgtgcgatatcgcccgtctgatacatgcgttctcccgggtaaaacggatcatcgagaaaacgctcctccgtcagctcaggccggttcagatagccccgggccacccctgtccccgcgatgtacagctctcctgccacgcccgcaggctggatggttcctccgctatctaatacatacagacgggcacccggaacgggtttaccaatcggaagccgcgtccgtccgctgtcccgttttcggtcacagacgtaaaacgccgcatccaccgtcgcttccgtcggcccgtagccgtgaataagcacggtctccggcagaagatcggcaaaccgggcagccgtaagcggtgaaagagcttcccctccggcaaacacgcgtgtcagtgttctgccgaggtgtgttcttgtttccgcaggctctgtttccagcgcgtctaaaaagctgttgaccatcgccggaataaaatgcgcggtcgtcaccttttctgaggcaaacgcttcaatcatccgcacaggatctttctcccagccggccggaagcagatacacggaggcgccggacatcgtccaccaaaacaattgccagatggaggcatcgaaagaaaaggatgatttcagcacgataatatcctcttccgttagcgggaactgcccttgcatccctgataaaaaggcggcggcctgacggtgttcaacagccactcccttcggtgttcccgtcgaaccggacgtataaatgatataagcgagcgaatcagcatccgcttcgtcagagacagcccctgtctccgcctcacttgtcagagcagaaagagacacttcaagcgtttctccggaaaaaccggaaacggataatcccggctgtgcaagcaggagacaagcgccgcagtcatcgagcatatagcgcagcctgtcctcaggatactccgggtcaagcggcacgtaggcgccgcccgcttttaacacggcaagcacagaaaccaccatctccggcgagcgttcagcgagcacaccgaccatgctttctttgcggacgcctttttgtcggagccgagcggcgagcctgtctgtgtactggtcaagctcggcgtacgtcagcataccgcccggaaaacggagcgccggacgatgcggcgaaagcgcggcacggcgggtaaacagcccgtgaagcgtcggggccgacggttcagccgtttctgtacggttaaacgcagttaacacccgtttcttttcattttcatccgccatatcaatatgccgaatcagccggtctggatttctaacggcattttcaacgatcgtcagcaaatgagtttgaatgcgtttgattgatttttcagtaaataaagcggattggtaatcaaaattcagctcaatcaatcccgtatctgtccgctccttaattaaaatggacagctcatttgccgtatgcccgctgaaaaacatcgccgtttcataatcgaaaccttctgcctgacgccacgcgagaggctggtattgcatcgaaatcccgatgatattttgcaggtcgtgatgaatctgccttaattcattgacaaaaagattgtaaggatatttctggtgccgcataacagacagctgctcttttcctacgctgcggacaaaggacaggaactccgcatcaggatctgccgtcattctgatcggcagtgtgctgacgaacatgccgagcatatccttttcgagcctggagccccggtttccgtaataagtgccgatggcaatatcctttttagccgtcagacggctgatgcatatgtataacgaagccataaacagagagatgatgctgatattattttctttgcaaaaacgccggatagattgttctaaggagtgagaaagagtgatagtatctctggaagccgcagtgctttgtctaagatgagaggttcgttccgccagtgaaaggtgttccggaacggttcggtatgtttcagtccaaaatgaacggtctttttgaaaacgggaagactgtaagtattgctgttctttttccatgtagctgagataggaaggtctgtgatgttcagttaaatcctcgccccgcatgatcttttggtagatgtcaatgagctggttgccgagcaggttgagcgagatgccgtccatgataatatggtgaaattttgaataaagccaaacttctttgtctgacatgacaagaagagtaaattgatacagaggtgaatgaaacagcttgaacggaacacgagtctgcgtgtcaatccatgcgtcccgctctgcctgatcagtatgagtaaaatcaacagtctctagagaaatcggccgatgccccgccagatacagctggggttctgatccgtccccttctgtcagttgaaacctgagcgaatcattttgcgagatagaaaaatctaaagcctggcgcagtacgtcaaaatcgatgtcccccctgaatttgacgcatgccgcgagattgcagatacttgtgcccggttcgagcagctccgtaaaccacactcttctttgtgcgtgagttaaagaataaacagtgttctccaatggaatccctccgcttcaatttaagaggataagaaagtgaaataattacaattaaatttcgacagcatatgacttaatcatccatataagcattattttaaaacatattttagaaatcacaataaaaaattaaattttctctaacattttttagaatatagtatatattcctcacttcacttcttcatttctataatctttataccatgtaaaacggtatgtatgcatactataaactggttcttaaacactataataaggaataaaatgtataattaattgcgcttttaaaaaggttttcctcccgaaaagaagttttatgttaaaaaatgaataatcggtgaacatgtaagaaagcggtatgtaaaaaaaaggaaggatattgccgatattactttttgaaaagattgattcataatcgcaatataatgttttacagacatcaaaaaaagccgaatcctctaaggattcggcccttcttattgatttgccagcacgactgcgattttgtcttcaatgtcttttccgtcatcttcgtcaagcagcccgttttgaagcacggaaaaaataagcgtatctcctgtttttgtgtctgcatagccggcaatcgaactgactgatgttagtgacccggttttcgctttaattttgccttctgccggagtattcttcagccggttccgaagggttcctcccgtcattctgtcgcttgcaccggcgacagggagcgaacgaaggaaagccgggtaccacttttctttctgaaccgcatacaaaagctctccgatttggccggcggatacgccgttaatatgagaaacgccggatccgtctcttgcaatcaattcatccggattcagcccgaacgatttgagttccgatttcatcacgtccaagcccttttcccagctgccctccccttttttcacttttcccatttccttgatcagaatttcggcgtgtccgttgttgctcagtttcataaacgggatcaataattctgaaagaggcatggatgtccgtgatgtgacgagctgggtgcggtgcggcattcgccctgttctgattttcccttttacagttataccctgtttagtaagcgcttgtttccataaatctaaagcataggacgacggatcccacactgccgcccattctcttgcctgtgccgagccggcaggtatggttccctttatcgtaatcacattgccgccgtgctcccgttcaaccgtcaaatctttcttttcatcagaagcgacggttttcacttcatttttcacacgaacgacgtccgtatggggagaaatcgaaatgcgcggctttttaccgggctgtttcgccgggctgatttccgcaatcaccgttccggtatcataatcctcatttggtgaagcggtaagagctgatacttgcgcgccataatattggccttcatcactccacggaagatcaactgaatacctggtatcgtcataccacgaatcatccccgaccagatctcctttaatgacttggatgcccctggctttgacctgtttagccatcttctcaaaatcagaagccaatagggtcggatcaccttttcccctgagataaaggtttccgcgcagctgttttccttttacggcgccgtctgcccgtacttctgtcttaaaggtataatcttctccgagaacggaaagcgccgcagatgccgtcagcagcttcatcagtgatgcaggcctcagccgcatatcttcccggctgccgaacagcacctcccctgtttttgctgaccggacactgacgcccgctgaagctccctttaaagcaggttcttcatccagaatgtgttccagctctttttgcaaagtatttttttgttcagccgccttagccgcatcatcaatataaggaactgcggcaatgatcaaaagcagaatcaccgcgctcaagcgtttcacatatgttttcaatgttatcccgcctctttcctattcttcgtcatgcaaaatggtgatcctggatgacgaagccgcttcttcgcccggtttcagaatctgaagccctgtcagtgatgcaggctgattcagattaaatgcatctgtaacggaagtataaggctcaagactgacaaacccctgctttccgtcaccgttatataccacccaatgcttgaaagacgtgtctgcttgatacaaaacggataattgctcatccggatgataaataacagcttcattattgccgccattccgtccggaagaaagaaaaacatcgtcaaactgtttatttttcaaagacatcccatgacggaacgcttctttatcaggcacatccaataaacggcccgtcggcacgaaacgttcatttaattcccacatgcggtcagccgtcaaaaatagacgggatcgctcttcattgaaaacaaaagttgaatgatagccgagcccccaaggaaaagcctccgttcccttattcataatcagcgcccgctgcgtaaacacattgtcttttaatgtataggtcatccggacaatgacatcgtgcggaaattgtttatgaacacggggaatctttgaaagatcaatttctgtttcgactttcattccatccccctcttctttcgctgccgccgctttccaatgctgattgtgaagaaagccgtgaatatgattatgtttatcctcttcgtttatctcgaattgatacgcgcggccgtcaaaacgaaacgtcccgtccgtaatccggttcggcgggaataaaacgggaatgccgtacagcatcggttttttgcggaattgctccgcagtttccggttctctcagaagccgcataccggttcttttatcccgaagcgatatgacatttgatccccactccggcacaatgatgcattcagcctgatcagtctccgcttttatggctgaaacccctaaataagtcgtatgttcaatcgtcataagcacctgccctttccttgttttctagcatgtataggaattccattttctaaactcattttccttctctaaaaaaaacatcgcccgtatgaactgagcgatgtgcggtaaaaccttattgaatcaatcgggtaatctgttttttcttccatacaaaccggtaatatccgtattgcagcagcaggctgacgacaaaagccgccggataaccgacccaaatgccgagaatgccgagattcgtataatgagaaagaataaaggccacaggcacttcaattccccaaatcgcaaaaatactgataatcgtcggccataacaccgtaccgctcgcccgcatcgttgctgaaacgatctgagcgtgaccgaaaatcaaataactccaaagggtaatcataatcagattgcgggcaatgtggagcgtgtcctgatctgttaaaaacaaagcaagtatctgccgggagaaggtataaatcagcacaatcaaaaccccgccgatcaaataattcaggccgatgccgactttgatgacctgtttcagccggccgaattgattggcgccaatggattgggcggcaaaaatggaaacggcgataccgaggcttaccgccggcatctgcacataactcgccacttggttgacgaccccgtaagcagccgtcgcgtttgatccgtaatgattgacaaatgaaatgaccgcaatttcagaaagtgacacgagaatcatattgatgctcgacggaataccgagacggagtaaaagcgcgagcagctttttgtccattttaagagaacggagcgcagtccggtcaaatgccaatggatgtttccttttccgcaaataaaccatgagtacgataaatgtcacgatgtttgaaatcacggttgcatacgccgaaccgtaaatgccgaacttcggaagtccgaaaagcccgagaatcaataagggcaagagcccgatgtttatgactgtactgacgattaacgtataaaacggagtctttgaatctcccgttccgcgtaaaaatgtcgtatacgcaaaatataaaaacatcagcggcattgcgcaaaacaaaatgcgcgcatatcggacactgacatctattacgttttccggcgttcccatcagccgcagaatatcaagcgtaaacacactgccgacaactgccagaacaacaccgagcataaaggtaaaagtcagtgtagtgccgacaatcgccttcatcctctcttcgtttttcgcgccgtaagcctgcccgatcagaatggaacttcctgaaccgattccgatcgtaaaggagatcagcagaaaaaacagcggaaaaaaagacgatacagcggcaagcgcatcgactccgagccaccttccgacaaataccattccgaccaattggccgacagattgcaatacattgcttaaaagcagcggcactaaaaacagtgacatcgatcgccagactgactggccgcggccttccgctgtttctaaatgatcttgtacttccatatgtaggactccttttttgattttcttccattttattattcagcagacagcttgtaaaaaccttttgttcaatgaaactctttatctttttctcacgtcttacatggaaataaaccataaaaataaaaagtccggaaaatatttctgaaaaggtattgtaatcttaccgtaattattgtaacatttgtaacataagagaaagagattgattgaaggagagattatatcatgaaaaaatggctattattcctcactactattacattgattctgtcattgggcactgcggcgactgcaaaaaatgcacctaatgaccttacacaaaaacaagcacttcagctggccctgtcagcgagagaacatttctggaatacaatgagcggcggtgcgcttaaatcaaacgcaaattgctcatctgaaccgtttgaatatcaaaatctgcaatatgtatttatgtgcaaagacctcggaacaaaagcgaaagccgtaaaatatctgacacccgcttttacaaagcaagcgattgacaaagggctcaaagattaccacttcactgtaaaagacggcaaattggctgttccggtcggcgacggagataacctcctgaattggaaaaaagcaaaaatgacccttctttctaaaaaaggaagcgtccaaacataccgcttcactgtacccactcttgacggttctctgtcagcaaaacgcgatgttacattcgtaaaagaaaacaacgtttggaaagtcaatcaatttgatgctgtcatataagaaaaagcccgcttgcttacagcgggcttttttcacatcatttccaccaggttttcacaaaatattcaactcaaaacccccttgtataacaagggggtttttgttttaccgacattattaagctgcgcctatctcatacaaaaaacgctctaggagagattcgaactcccgacctgcagtttaggaaactgctgcactatccgctgtgctactagagcctgcttctattatagtaacgctggcggccgtttttttcaagtctacagccctccgaacactttataggcggctctcgtcgtatcttcatctattccgatataacgcattgtaatagacggagaagaatgattcaaaatcctctgcagttcagcaatgtcttttgtcctctgataaaaatgatacccgaacgtctttctaagcgtatgcgtcccgatttcctccaatccgcaagcggcagccgcttcctttaatattctgtatgcctgaatccgggatatgggcttattcgtccgtttcgatttaaacaaatagtcatcctctttcatgtcttttgtataagcgtatatgtcggcctttaaagactccagtatcagaatttttcttttctttctcgttttgctttcggttgcccacacatggtctttgttcctgacatccctcacgcgaagcggcagaacatcagaaatccgcagtgcgctgttcatgccaaaaataaataaaaaataatcacgatcacttttcttcattaaatactgtttgacttcctggatcttctccaaacttcggatcggctgtacgatatgcatcaaaaaaccccttataatagtaaagtaacatattgagctttatgttactattatagacgaaacccgttgaatgataaaggataaagggtcttatgtaacataatatacatagtgttacataaggtgaatcagatacgcagtttcaataaattcctcaaaaacatcattttcagcccggtgacaagcttttaaacaaatagagacccaaggcattaaaaaatgaaaacaacgtccttaaaaggaaatctgagcatccgtttttttgtgagcaaccgaaaaaaatgcaaaaaaaagacacaatatgaaattgtgtcctagtcttcatcttttacatcaatgtcttcaggaagcggctcatttaaaaactcatgaatcatttccttatatttttccagctgttcgagatgggtttgaaattgttccttgttgattaaatattgctgcccgtcatggacggcccttattttattcgtcaaaacaagattgtgcacatattcttcaggaagactggtaaactcagctgtctctttgatcgttaaatacatggctcacgttcctttcatatgtcatgtgagtgaattctgttttgtttattgtagcttattttttgtctttatgcttgtttcacagctttttcagtccggtttcccatttagcctatttgcgactgattacattcacacagaaactccggctttttgcgcaccggactattccgtttgtcacttgtgaaaacagcacattttacttactctataattgtaagcggaaaacaaaggaggcagactatgaaaaagaaaaagtttatgaatctctgttttatcgttctgctcagtacgttgctcgcggccggaagcatcccttatcacgctcaggctaagaaacacccgttttcctatgacgactacaaacaggtagatgtcggcaaggacggcatggttgccaccgcccatcctctcgcttcgcaaatcggtgcagacgtgctgaaaaaaggcggcaatgcaattgacgccgcggttgccattcaattcgcattaaacgtaactgaaccgatgatgtcgggaatcggcggcggcggatttatgatggtttatgatgcgaagacgaaagacaccaccattatcgacagccgagaacgcgcaccggcaggcgcaacaccggatatgttccttgacgaaaacggcaaagccatccctttctccgaacgcgttacgaaagggactgcagtcggtgttccgggaacattaaaaggacttgaaaaagcgctcgacaaatggggcacacgctccatgaaacaactcatcaccccttccattaaacttgcctcaaaaggctttccgatcgattcggttttagctgatgccatctcagattataaagacaaattatcacacactgctgcaaaagacgtgtttcttccggacggagaacctctgaaagaaggagacacactcatccaaaaagacttagccaaaacatttacagctattaagtacaaaggcacaaaagcattctatgacggagcattctccaaaaagcttgcggaaacagtgcaggaattcggcggctcaatgacagaaaaagatattaaaaacttcaatgtgacgattgacgaaccgatctggggagattaccagggctatcatatcgcaactgctcctcctccaagctcgggcggtgttttcctgttgcaaatgctgaacctcctggatgattttaagctttctcaatatgatatccgttcttggcaaaaatatcagcttctcgcagaaacgatgcatttggcttatgctgaccgcgccgcatttgccggggatccagaattcgtcaacgtccctctcaaaggcctcttgaatccagattatatcaatgcccgcagacagctgatagatattgataaagtcaataaaaaaccgaaagccggcgacccttgggcctatcaggaaggttctgcaaactataaacaagtggagcagccgactgacaaacaagaaggccaaacgactcacttcacggtaactgatcgcttcggcaatgtcgtatcttatacgacaacgattgaacagctgttcggttccggcattatggttcccggatacggcgttgtgttgaataatgagttaacagacttcgatgcggtgcctggcggcgcaaatgaagtgcagccgaataaacgtccgctcagcagcatgactccgactattttattcaaaaataacgaacctgtcctgactgtcggctcccccggcggagcaacgattatttcttccgtcctgcaaacgatcctgaacaaagttgagtacggcatggatctgaaagcggcggtcgaagagccgagaatttacacaaacagcatgacatcctatcgatatgaaaaaggagtgccggaagaagcccgcacaaaactgaacgaaatggggcataaattcggcagcagcccggttgatatcgggaatgtgcaaagcatcctgatcgaccgtgaaaacggcaccttcaccggagttgccgactcaagccgaaacggagccgcaatcggcgtaaacttgaaaaaatgcgaaaaatgacaaggtgaaaagcctcgtttctcaagctgagaaacgaggcttttgtttattctgcactgtattcagatgaggttttttcagacgttaatgacgcaagcgaaagcacaccgcacatcgcgatgacaacacccgctgatccgatccatgtcactgatgcaagagacaaatgagtgacaacaatgcccccgatgcccgccccggccgccatagccagctgcatcacagactggttgaggccaagtaatacacccgatgattcaggctccatcgttgccaaatgatactgctgagcaggcccagatgaccaggcggcgaaggaccaaaacataagcactgccgccgctccgaaagcagaatgtgtgacaaacggcaataacatgagcatgatagcatgaagcgccattccgccggttaatgtcatacgcgccccccatttgtctgcgctgaaaccgcctgctttagaaccggcaagacttgcaacaccgaaaataagcagcaatgtactcagtattccgcttccgatatgagtaacgttcagtaaatacggagaaaggtacgtatacgtaaccgaatagcctccgagccaaaaaaacgtaatggccagcccgactgccacctttcgtttcttcaaaagagaaaattgctgaatgagcggcaccggtttatctccttttatctcaggcaacgcgaaacgtataataagcatggcaatgattccgattgccgcaattccggcaaaaaccaccttccagccaaaagcttcagacacggttcttccgatcggaacaccgataatgagcgccgccgtaaaccccataatgacggttgcgagagaacttgcctgttttcccgggggagcgatttttgctgcgatcgtaagcgcggtgaccaccacagttcctgctccaagcgccatgatcacccgcgctcccgcaaataagccgaatccctgcacaaggaaagaaatgatattcccgataacaaacagccccagagcatagatcatgagcttccttctgtccagttttgctgtaagggccatcatgacaggcgttccgattgcataaacaagtgaaaaaatcgtaatcagctgccctgccgctgccacagtaactcccaaggaacctgcaattttatcaagcatccctgatatcacatattcagacgtccccactaaaaaactgataattgccaaaatgtaaatcttccaggtattttgcacctgacacactccttcattgatgatttatataaagatatattgtgatatatcgatataaagaggtgaacaaacagaaacaaatcgcaatatgtcgatgtgtagtcggaaaaagaaactgaatccctcttctaaaggattcagcctacatttcgcgctgaaaataatcggccatcgcctttatcgcgtcttcatctcttttataataggtgtatttgccaatccgttttgtttggataaggcccgcccgctgaaggatggaaagatattgagacgccgttgactgtgtcatctgaagcttatcggtgatctggctgacacatactccgatctcattcatatcaatgccatcatgcggggcgaagtgacggtccggctctttcagccattgcaaaatctcaagccgtgactcattagacaacgctttaaaaacatcaataggtttcatacgctttattatatcgtgattttacgatatgtcaatattgtttttattaaatctctattttttgttttgcctctcttatgatccgggaaataaaatcactcacattctcttcaaatgtgtcttcccgcccgtattgccttacatgtacagattgatggcggcactctcgatctcccacaacagcaatatacgggatttttttcatttgtgcttctctgattttatagccgagtttttcatcacgctgatcaagctcagcccggatacccgctttcttcatttgccggtgcacctgttctgcgcagtcccggtgtgcggtgtttgatactgggatgatttttgcctgtaccggtgcaagccataaagggaacgctcctgcgaaatgttctgtaatgattccgagaaatctgtcgagagatccgaataccgcccggtgaatgacaacaggacggactttttggtttttttcatcaatatatgttaaatcaaatttctccggcatttgaaaatccagttggacagtggcgcattgatggctccggttcagcgcatcttttatatgaatatcaattttcggtccgtaaaatgcaccatctccccgattaaaccgaaaacgatatccctgttcttttaatactttttctaatgcgctctcagccctgtcccacaagtgttcgcttcccatgtaatcttccggtcttgttgacagctcaatatcataggaaaaaccaaatgcggtgtacacctcgtgaataagctgcagcgccgaagcgatttcactctcgatttgatcctgcgttacaaaaatgtgtgcgtcatcctggcaaaaagatctgacgcggagcaggccattaagcgccccgctgaattcgtgacggtgcacctgaccgaactcagccatccgaatcggaagatcacgataagaacgaagcttttctttaaataagagcatgtggccgggacagttcatcggctttaacgcgaagcgctgatgatcggcttccgagaaatacatattctctttataatgttcccagtgaccggattgctcccaaagacgctggttcatcatcataggggtgcgcacttcctgataatgataggcatcctgcttcgaacgcagaaatgattcaagcgtgtttcggataaactgaccgttcggcagataaaaaggcatacccggcgcttcttccgaaaacataaaaagttgtaactccgatcccaatttccgatgatttctcatctccgcctctttcaacagctgaaaatgtctgttcagctccttttctgaggaaaatgcttttccatagatgcgctggagcattttttggttgctgtcgccgcgccaataagcccctgatacatgagtgagcgaaaaagcttttatctgtccggcagacgccaagtgcggaccccggcataaatcaatgaattcgctctggcggtatatactgattgtatcagtctgcggaatacccgctaagagctcaagcttcagcggttcatgagcaaacagctgctctgcctcttctctggagatttcttctctgataatttccggattttccgaaatgattcggttcatctctttttcaatgacggccaggtctttttcagtaattgtttcatccatatcaaaatcataataaaagccattttcaataacgggtccgatccctaaacaaaccttcggatacagacgttttaccgcttgcgccaatacgtgtgctgctgtgtgtctcatcacttccagtcccgcttcagactgaaaactgcacagttcaatcgccgcgtcaatctgaatgcttcttctaaggtcaaataacgatccgtttatctttccggcggcagatgcctttttcagactcggactgattgattgtgcgatctcttctaacgtaacgcctttccggtattttttttgtttcccatcaggaaaagtaatcacaatgtgtggctccttcacggtctgatctctcctttatttttaataaaataaaaaacacactcatcccaaagctagggacgagtgtgtgtcagacccgcggttccacccaaattcccgccacttcaagtgacggctcatttttgccgtaacgcggctatacggtatcggctgctttcgttcaccaatacagctcaaaaggcggtaagctcattcttcgtgccgggaaggtctcagccgtgccttccctctctgtatggccggttaaaatgtctcatgtccttatcattgcasatttttcttatataaacataaaaacacactcatcccaaaagaagggacgagtgtgtgtcagacccgcggttccacccaaattcccgccacttcaagtgacggctcatttttgccgtaacgcggctatacggtatcggctgctttcgttcaccaatacagctcaaaaggcggtaagctcattcttcgtgccgggaaggtctcagccgtgccttccctctctgtatggccggttaaaatgtctcatgtccttatcattgcagatactttatccgaaaaactttcttttattatacataaattttccgaaaaagaaagtttttttaagaaaaaccggaacgaaaaatttgggcgtacacagctgtcctgttttctcatcttccgttcggtaatgcttttaatccattcagcagttcttcaaacgccgatgtcaaaaataaatcactccggtagatgaatgatatattcatatcccgaaactgttcagggagctcatgaagaaaaagatttttcctgttttgaaaataacggacggctgatgcaggcagaaaggaaacccccatccccgcctgcaccgccccaataatggcttccaacgtaccgaattcaatgattttatgtgcgggtacttcctcttctttcagtatgttctgtattttacggcggtgcgaacagcccgcggcaaaataaagaatcggctctcgcaacaagtcttgcaaactgccttcccgcttatttgaaaccaagaccaattcttcttgaaatacagcgacttgctcaagatcttcgtattcgaccggaccataaacaaaagcgccgtccagctcatagcgtaagacgcgctgcactaaggtatgtgtatcaccggttgacagagatagctgtactttcgggcagcggctgcagtactctgtgaaaaattgagggagatggacggctgccgccgtttcaagagaaccgattcgaagcggaccgttcggatcgcctgcctcttgcgccgttttttgcgcctcatgcagcaattgaaggattctgtctgcgtctttcaataagttttcacctgcaggcgtcagcgtcatcccccgatttgtgcggtaaaaaagctgtgtttgcaattgccgttccagctgctgaatcctgtttgtcacatttgattgaacataatgcaggctttctgccgcctttgaaatacttcctttgcgggcgacagcctgaaaaatctttaagtctccgctttccatgtaagggcaccttcttgctatgatttttattgatagccggctatcaattttcatttatttactgcagctgatacagcctgtaaaatctttctcatcaatcataaaggagagaagaatgatgaatgcccttatcatacacgaaaatggctttgatttcaggcaggcacctgacaaaaggccgggaaacggcgaagtaaaaataaagctgaaaacagccggattaaaccatcgtgatttgtttttaatgaaaaaccacgaaaccggaaaccatgaatttactctcggttcagacggcgcgggaatcgtaaccgaaataggacacggcgtccggtctcatttactgcatgcagaagtcatcatcaacccggtgctgaattggaagactgttgaggacgtaccggccgtccctgacattttaggcggtccgagcgacggaacattttcaccttatgtcatcgttcctgaggaaaatgccgttttaaaacccgaacacctgacttgggaggaagcgggcgtgctgccgttatcagcattaaccgcttatcgcgccttatttacaaaaggacaattaaaaaaaggcgaacatcttatccttccgggcatcggaagcggcgtggcaacatacgccttattaatggcaaaagctatcggagcgacagtcagcgtcacctcccgcagtgaaaacaaaaaacaaaccgcactgtcatacggtgcagaccgggcgattgacagctacggtgactggaatgaggcgctgaatggcgaaaaagcagatatcatacttgacggtgtaggccccgccttatttcaacactatcttgacattatgaaaccgaatggccggatcgtaacattcggcgccagttcaggcgatcagctcggatttcctattcgctcgctgttttttccgcagattcatattctcggtacatcaatgggaagcaatgaggaatttgcggatatgctggaattggtaaaccgctgcggcatccgtcccattatcgaccgcatgtaccctctcagtgaagcagctgccgcttttaacagaatgcgggaaggacggcagttcggcaatatcagcttacgtttggatgtctaaaaaagaggagcggacccgtccgtttgcttatttgtttataagcgtttccgcttgaaattcaatatgtttttcttcatcaattaaaatctgcccgcaaatcgactgcatacacacagagcccgtcagcagcaccgtggtcgactgctcaaggcttgcaaatcgtctcagtctgcggaagaaaacaatctctccactctgtaaaacaaaattctatatattatcttccacgttacctttatatgaccaataaaggaagaaggaggtttcatttcaatacgaaaaaccggctgatcccagccggttttataaataaacccctttatttacggtaaaacagtgctccccattaaataactgtcgacttcgcgcgctgcttcccggccttcattaatcgcccatacaatcaggctttggccccttctcgcatcccctgcggcgaaaacaccgtcaacattcgttttataatccccatatgccgcctgaattttatgatttgccgaatcgacaccgaactgtttcaataatggctgttccgtcccttcaaaaccgatggcgatgaacaccagctgagcaggccatactttttctgtcccgggcagttcatgaaattcatactttccgaattcgtttctgactttttccatttgaatggtgtgaatctcttgtaagcggccctgcttatcggccaccatttttgtcgtctgaattgaatattctctcgggtctttgccgaactttgcctgcgcttcttcataggcgtattcaagggtaaagacgtgcggctgttcaggccacatattgtcgttcgtgcgcgtttgaggaagtttaggatgtttcccgaactggtgcacgctgcgcgctttttggcgcagcgcggttgccacgcagtcagctcctgtgtctcctccgccgattacgatgacgtctttccctttagcgtctatatattgtttgtctttaaagttggaatctaaatagcttttcgtcgccagtgttaaatagtccatcgcataatggacgccttttgcttcccggccttcaatcagcagattgcgctgcttttgggcgcctgtgcacaaaatgacggcatcaaattgatctttcagctcatctgccgttatgtcaacgccgatttcggtatttgttacaaaatctataccttcctgcgtcaaaagtttaatacggcgttcgacgacacttttctcaagcttcatgctcggaatgccgtacatcagcagaccgccggctctgtcggcacgctcatagaccgttacggaatgaccggcttggttcagctgatcagcgcttgccagacctgccgggcctgaaccgacgacagcgacttttttacctgtgcgtttcgctggaattctcggctgaatccatccgttctcaaaacctttgtcaatgatcgtccgctcgatgtttttaattgaaacagccggatctgaaatagccagcgtacaagatccttcacaaggagcgggacagacccgccctgtgaattcaggaaagttattcgttttcagaaggcgctccaaggcttctttccagcgcccccgatagacgaggtcattccactccggtatcagattataaatcgggcagccggacgtaaaaccgttgatatcagcgccgatttggcaaaacggtgtgccgcaatccatacaccgcgccccctgccgctttgacgcttcatctgaaaatggagccgaatactctttccaatcctttaagcgagtgagagggtcccgctcagccggtttttctcgtttttcttccatgaatccagttggtttccccatgttcctctcccctttcttactgtactaccgcttgtttatggactttggcaggcgtttggtgaacctttgtattggcttcaaaagcatacataattgcgtcttcttctgataaacccgccgctttttgttcttcgatgctgaggagcatttgtttatagtttttcggaatgactttgataaaggtttctgcggctttttcccaattgtccagaagatctgcggcttttttgctgtttgtcagcgccgcatgccgtttgaccatttcttgcacttctttgatctccgcctcatccatcagcttttcaaatgaaatcatttccatgttgcatttgcgtttaaatgctttggcatcatcactcaggacgtatgcgataccgcctgacattcccgccccgaagtttttgccgacttcgccgaggacgacaacccggccgcctgtcatgtattcacagccgtggtctccgataccttctacaacgacattgactccgctgttacggactgcaaaacgttcacctgcgcgcccgttaatgtacgcttccccgcttgttgctccgtaaaatgcgacgttcccgataataacgttatcgtgcgtttcacaattgaaggcatcaggcgctttcacgatgatttttccgcctgaaagccctttgcctacgtagtcatttgaatccccgttcaaatgaagcgtcatccctttagggacaaatgctccgaaactctgtccggctgatccggtaaaatgaagtctgatcgtatcatccggcaggccttccgctccgtagcgtttagaaatttcacttcccgtcacggtcccggctacgcgatttgtattattgatcttgatttcagcttccgcttcctgaccggcttcaattgcagcctgcaccgccggaagaataaccgtcatatcaagcgactcgtcgattttatggttttgcgccgtacggaaagtgcgtacgccttcaggctggtacagcagtgtggataaatcaagctggcccgctttccaatgcgctttcgcacgttcactgacatgtagaacgtctgtccgtccgatcatttcatcaagcgtcttaaagcctaactgcgccatatattcacgcacttcttctgcgacaaacagcatgtaatttacgatatggtcaggatcgcccatgaattttttgcggagctccgggttttgcgtcgcgacacctacaggacatgtatctaaatggcaggcgcgcatcatgacgcagccgagaacgacaagcggcgctgtagcaaagccgaattcctccgcaccgagcaaggcggccattacgacatctcggcctgtcatcagcttaccgtccgtttccaataccacgcgatcccgtaaaccgttcagcatcagcgtttggtgagcttctgcaagaccaagctcccacggaagacccgtatgtttaatacttgttttcggtgacgcgcccgttccgccatcgtagccgctgatgacgatgacatccgcagtgccttttgccacaccggccgcaatcgtgccgacgccggcttttgacacgagcttgacgctgattcgcgcgcttcgatttgcatttttcaaatcatgaatcagctgcgccaaatcttcaattgaataaatatcatggtgaggaggcggtgagatcagccctacacctggtgtagaaccgcggacatccgcgacccaaggatataccttgttgcccggaagctgaccgccttctcccggcttcgccccttgcgccattttgatctgcaattcatccgcattgacgagataatggctctttacgccgaaacggccggaagcaatctgtttaatcgcacttcttctgtcgtcgccattttcatccggaacgaaacgtttcgggtcctcgccgccttctccgctgttgctttttccgccaagcctgttcatcgctatcgctaaagcctcatgggcttccttgcttaatgaaccgaatgacatcgctcctgttttaaaacgtttcacgatggaagcagctgattcaacttcctctaattttaaaggcttgcggtcttctttgaaggcgaacagattgcgtaaaaatccgattcgttcttcatccgctgcatgagaatactgcttaaacaggctgtaatcatttttgcggcaggcccattgcagcgtatggatggttttcgggttgaaagcgtggtgctctcctccgttccgccattggaattcacttcccggatcaagggtttggctgtaatcatccttgtacgccgcttgatggcgctgtttcgcttcttgcgcaatcgtctcgatatcgattccgccaagctgagatgcagtaccggtaaagtatttggcgataacgtcttcaccgatgccgaccgcttcaaaaatttgggcgcccctgtaactttgcacagttgaaatccccatttttgacatcactttcacgacgccttctgttacgctctttccgtatttgctgacagcttcttcatacggaatatcaagccggccttcatcgatttcctgcttatacgtagcgtaagtcaaatacggattgacagcatctgcaccatacccgatgagagccgcaaagtgatgaacttcacgcgcttccccggattcaacgataatgcttgcttttgttcgcaggccttgacggatcaaatgctgatgcagcgcactgacggccaaaagcggcggaatcggcgtcaattccttactcattgccctgtcagataaaattaacagagatacgccttccttgatcgctttttccgcctgctgaaacaaatccttcaggcctttttctaggtcatcggaaaacagcgtgcggatgttctggctcttaatgtcaggatgcacaagtgttttcagcgcataaaactgttcgtttgataatacaggagtatacaattttatgcggcgtgcatttctttcactcggatgcagcagatcgccttcagctccaagccaggtcaccgtagaggtcacaagctgctcgcggatcgcatcaatcggcgggtttgtgacttgcgcgaacagctgtttaaagtaatgaaacagtgattgggcgcggtcggataaaacggcgagcggcgaatcatttcccatagagccgagcgggtccttgccttctttaataacaggaattaaatacttctgaatatcttcatacgtatagccaaacgctttttgacggacgagaagatcatcgaattgttcctcttcccggatttccgggtcaggattcacttgaaccaattcttcttcaagccatttttgataagggaattcattggcaatttctgttttcacttcttcatctgaaataatccggccttcttctaagtcaatgagcagcatttttccgggctccagacgttttttatgaagaatggtctcctgctctacttcaataacgccgacctcagatgagaaaataatatggtcatcttttgtcacatagtaacgtgccggacgcaagccgttacggtcaaggatggcgccgatctgttttccgtccgtaaacgaaatggcggtcggcccgtcccacggctccattaaagagctgtgatattcataaaaagcccgtttcgctttagacatgtgagtgttttccgtccatggttccggaatcagcatcattgccgtatgtgccggtttccgccctgccatcacgaaaaattcaaacgcattatcaagaatggatgagtcactgccctcagcatttagaatcggcagcactttgtgaagatcgtctccgaagctttctgaaacgaactgctgctccctcgctctcatccaattgatattgccccggagcgtattgatttctccgttatgaatcagatagcggttcggatgggcacgttcccaagtaggaaaggtatttgtgctgaaccttgaatgcacgagtgaaaatgcagatacgaaggtttcatcctgcaaatccaaataaaaagcgtcaacctgctcaggcgttaacaaccctttataaacaatagtctggcttgacaagcttgcgaagtaaaaatcaagctgttcttgaacgccccaattttccgcctgcttccggatgacatacagtttgcgttcaaaagcaaggctgtctttcaaatcgtttgcggcgccgatgaatacttgacgcacatatgggcaagtgccttgtgccactgttccgatttttccgacatttacagggacggttctccagccgagaacgatctgtccttcctgctcaatgaatgcattcacctgtttttcgatcttttttctttcctcttcattttgcgagaaaaagaccattcctaccccgtaacggcctttttccggcagtctcatttctccgcactctttcttaaaaaaagcatcagggatctgaaccatcaggccggcgccgtcacccgtattcggatcactgccctgtcctcctctgtgatccagctggcaaagcatcttcagtccttttttgacaatgtcatgtgaaggtttcccttttaaatgggcatacaagccgattccgcatgcatcgtgctcaaattccggacggtagagaccttgtgctttcggcatttgattgtaagtcataattcctctcccccgatcagtttccgttaattatcggtcataaaatctgacaactttaaattaattgtaagttttcaaaacaatataaacaatatataatttagatcaaatacatctcaaaatgagatagataggtgtgaacgcaatggaattacgccagcttcggtattttgtggaggtagcagaacgggaacatgtgtcagaagcggctgatcatctgcatgtcgcacaatccgccatcagcaggcagattgcaaatcttgaagaagagctgcaagtcactttatttgaacgggaaggcagaaatattaaattaacgccgatcggcaaacaatttttagaacatattaaaacggcgatgaaagcaattgattacgcgaaggaacaaatcgatgaatatcttgatccgaatcgcggaaccgtcaaaataggatttccgacgagccttgcaagccagcttttgccgacggtgatttcggcgtttaaagaggaatacccgaacgttgagtttttgctccgccagggttcttataagtttttaatcgaagcggtaagaaacagggatatagatgcggcgctgctcggccccgttccgacggaattccccgacataacaggcaatatcttattcacggaaaagatttacgcgcttgttccgctgcatcatccgcttgccaaacagaaaaatattcatttaattgatctgcgcggcgaccaatttgttttatttcctgaagggtttattctccgtaacatggcgattgacgcttgcagacaggccggctttgcgccgcttgtatcgacggaaggcgaggatttagatgccattaaaggattagtctccgcggggatgggagttactttattacctgaaagcacctttgcagaaaccacaccccggttcacggtcaaaattccgattgaatttcctcaagtgaagcgcaccgtaggcattattaaaccaaaaggaagggaactggctccgtctgcaaatgatttctatcattttgtcattcaatttttctccaaacttgaacaatatcaataaaaaacaaacccgagcttcaaaacgaagcctcgggctttttcatatttttatagatctttctcagccgatcggaatggatagttcaacgtggcagacaaacgcttccggatcaatgactgattgatcggtctgtttgggcggcgtttctttaaatgtcttcagctgggctgaggaatagttgacgatgccgagtccgagctcttctccctgctgatcaagcagcctgacaaccgctccgctgctgaatctgcccttaatctgctcgatgtcctgcggtgacagctccatatttccgtttgcgacatcgcggctgctttctttttccatcacaatttcgccttcggggccggaattaaatgcaagccattgttctttgtggtttaacggcagggttcctttcgcttcaaaataagttccttcagccgcctcatctaccgcttgaagcagaatgtccggaatgttagcctgcccgagaaagcctttaataccggaggccatcacaattttaaaagcatccagtttcgaacgcattccgccggttcccatgtcactcccggcatctcccgcgcttgcttctatttccggagtgatgtcacttacatgacggattcttttcgctttcgggttgctgcgcggattatcatcatataaaccgtcaatgtctgataaaatcacaagcatgtcggcatcaattaaacctgccaccttcgctgcgagtgtatcgttatctccgaatttcagccggttgactgtgaccgtgtcattttcattaataatcggaataatgccccgttccaaaaggacgttcatcgtattgcgcacattatggtagcggtattcatcggaaaagtcgcttcttgtaattaaaatttgtgatgcgacataaccgtgcgctaaaaacagctttgaataagcctccattaataatccctgcccgatggaagcagaagcctgtttttcagggaggctttccggtttctgaataaatccgagcttccgataacctgccgccactgcgccggaagatactaaaatcacttcatagccgctgtctttcagctgtgcgatttgatccaccaatgcttccagctttcttctgctgatttccccgtgcaggctcgtcagtgagctgctgccgattttcaccgcgactcttttgatcttcgtccgagacgtcactgtatcactcctgttttttaacgattatagtgctgccgttttttcaattgttttgctgatctcaatagaacgttcggtcgcgtgtttaatggctttggcaatggcttctccgccgccttctgacctgagcgcatcgaggccggcttccgtcgtgccgtttggagaggtgatgttttcccgaagcacatccggtttttcacccgtttccatcagcattttagcggcgcccaataacgtttgcgcgccgattttgcgggacagccgtttgtctaagccggcttcttcacctgctttttcaataaactccattaaataataaaagtacgccggtccgctgcctgcgatgccggtgaaaatgtccatctgatcttccttgatcacgtacacttccccgaggcattccaaaagggataccgcggtttttgctgaaccgtaagagacatggtctccgaaagccgcagctgttgccgattcgccgatcatgctggatgtgttcggcatcactcttacaaccggctgattatcatgtaatgattgttgtataaatgaggttgttatgcctgccagaacagacaggatgatttgatgaggttgaatacgccgtttcagcgcagccagagcgatttcagcatccttcggtttcatggctaaaataaagacatcaatgtcttcggttttcatgctgtcaaaagcaatgccctgaataccgtattgatgttccaattcagcgagtcgctctgtattgcggcggtttgtcacgcagatgttttggttgggaattttttttgcgcggaccatgcctgatatcattccttcagccattgatcctgctccgataaaagcaactttcttttgatctaagatcggtaacatctcccttgttcgtattttgttcgtatttttcacacgttttttatgttaccacttcaagagtcgatgtcaagtttgaaggttttattgatatgtattgttccgagcctgctattatgtataatgaatcacagaacataccttttgagcccgggaggccgggtgcgttccggccggatttaaaaattatctgaaatggctttttctatcagctttttgcagcggtcaagctctgtcttcagctgttttttgtaaagcttcgcagcttcatagtctttaaattgatagagaacgacttcctggagtttggctccctcttttttcacttttacttgctttaaaatcccgtcatccaatagttcgtgaagtgaacggtacacctcggtatgattcggcttaaaaccgatgggtttaaattccgaacgcagcacctcgagaagcttcagtccgtaaagccgttcctgctctgtcattgtaatcatgtaaagctttaaaaaagctctttgtttcactaaaaaaccggttgaacttcttttttcttctttcaatatgtgcacaccctttcctctaacaaataattccatgtactaaatattctctatagatgcccttttccctttttatatgctgtatcagttttatttgtatcttgttgtttttatggatagagggaaaaattgaataaatgaacatttggtacatagtttatttagtataattataacatgtttgtgccgatatttcattcttccgttcaggggtagtaccacatcactatcaagttaaaaaacaaaataccccctaaaatgaaaaaatactgtaaagtaataataaagatttgatattataatcaaattatcgaaatgtttatttggaggttttattaatgaacattttaagttcttggttatataacatgaaaatcataaaatacttattgggaaggagttgataatttaaaactaaaggagagatattaatgatatatagaaaagcaaatcagaaagattatgatacaattttgaatatatgggaagagtcggttttagctactcatcattttttaagagataccgatagagaagagtttaaaaaagaaataccctcatatttcccacatcttaatgtccagttatggtatgagaaagaagatttaattggcttttctgctataaataaacaacacttagaaatgttattcttaaaacctaataaaataggtaaaggatacggtaaagctattattaattctttaattaaagactttgatattacaacagttgatgtaaataaagacaataagagtgcaactaaattctatattaataatggcttttttatagaaagtgaaacggaaacagattcttctggacgtccataccctatactagagctaaagttaaaataaggtaaaggtgaaaatcctcccttacctttgatttttgcactaaactgcacgttagtccaataagaattaaatatttggcggtgtacgcaggtgaaaaaattgctatacattgtgccatcaccaagttagatatctacttagaattgtagtgattatagtaaaaataaaaacaacaggataatcataaatgtatgttatccaacgttttttatattatcgcaggattgaatgtttatattattaattgtaatttccaaagttcccaaagcgtcttttgggaactttatttgcttaacgttgtaaatccgcatttttctgacgctaccccaattataacttattttaatcttgatatttccttatttcgggttgtgacagcttcgctggtactcccccgttcacggaaattcagaagacgaatcttttgatctattaacattcccttcaaaagataatcagaagcgccgatggaccgtttcgaatggaataaaaaagacccgtcatgaagacaggtccccttttgtttaaggattggttgaccacaaaccggcagttttgatgaaaatgcgcggatgtaatttcaattgagcaaccatatattctgcaagatcctcaggctgcatgactttttccggattgccgtctgtcagatttaattcaatagacatgtcgctggcaaccgtgctcggagtcattgcgctgacacggatgttgtgttttctgacttcctgcatgagagattcagtcagaccgagaacggcaaatttagaagcgctgtacgcacttgtcgccgcggcgcctctttggcccgccgtagaagaaatattaatgatatctcctgattttctctcaatcatttcaggaagaacggcgcgtgtcacgtggtatacacccattacattaacttgaatgatgtcttcccactcttcaggcgtaagatccaaaaatccgccgaatttgctgattccggcattgttaatcaagatgtcaatctcaccgagttcttctttaatagaggagacggcttgttcaacctctttttggttttttacatcggcagcagcgaatgatgcctttacaccaagggctttcacttcttccgcaaccttttcgacatttgcttctgtgcgcccgattaaaccgatattgactccttctttggctaaagcgatagcggcggcgcggccgattcctctgcccgcacccgtgataagagccgttttgttttgtaagctttccacgtctttcaccctttctgaatgtccttatgtacgatttcacattataagcagaaaaaaaacaattagcaaataaaatgattcaacacgatccgtaaagggtatcaactgaaaaaaaggagtgaaaagcagatgatcatcattttgtatatcagtgctgccgttgcggctgccgcattaatttatgcagccgtatccgccgtgcattttaaaagaaacacagcgcctgatataaagaagattaacgccgcgacagcgtccatgcagacggccgttgatgaaatcaaaacagaaaccgatctgttatcgcaaaagcagaaagagctgaaagaagattttctcactaaaaaaacagccgtgcaaacgacggcggccgaagttaaaggaacgcctcacgtcctgaagatgctctggaacgccggtaaaagtgatgtatgagcctgcatgtcatccgacgtttttgatgacactaagagaaaccggcggattcaaggaggcataacatgatttgcgatcgtgagcggcttgcgcattttttgcagcagcttaaagcactaccttcttcgggagggtttacaaaatcggatttgctgactccggctttccatttagctaaggacggagatctggatttgtattattcgcctcataatgaatatattaacccttatgcagtcgttgccatttccggaatcacacccggtttttttcaaatgcagctggcttacaaaaaagcggcacagcttttaaaagatggcgaaactcttgaaacgatagcctatgaaacaaaaaaagcggccggactttccggttcaatgagacagaacatcatcgaaatgcttaatgaatgcggtctgccggccgcgcttcacgttgaggattcatcccggttatttgattcaaaacgggagcttcttcatacaacgtccgttatcaaacaccctgttttttataaacagaaaaactatacgggacatcggccggcaatcagcaggtcagctcttctaagccgttacgcgctgacatgttttccggatgaaatagaaatgatgaaaaaggacattctgcttatccctctcggcaaagcagcagaatcagcctgccgcatgctgaagaagaacggcagaatgggtcatgcggtcattctggaaggcttcccgcatccgtccggagcaaacggacatcgtttcaaacaatttcacgaaaacaaacaatcgttacgtgaacaaattcagcgctttgccgggtttcttcagcagctgtaaaaaaagcgccccgaattttcggggcgctgctgttaagaagcgtattcaggcaatgctttattgtgttttgccgttttctcttcaggtattttgatttgattggtcaagattgcacttacgaaatagagcgctgcgaaaatccatacaacgccttgtgcgccgacaagcccgatgaacgcccaggcaagcgcggggccgacaaatgccgacaggcccgcagccagatttaacacagacatggcagcacctttatcgctgccggccgccgtcggcacgatagccccgatcggaacgaatccggcgaggagccctccccatataaaaccgacaatgctgacgaaaagcaagttcccatgtgatacaacaggagcataatataataaaagagtaaaaatgccgcagcccactcccccgaaccacatgacagtcttcttccagccgaatgcatcgccgactgcgccgaagattaagttaaagacgatatttccgagaaagatcgttccccaaatttgaagccatacatttgtagaaatgccgtgctgcgccatatgcatcggaagaaataccggaaatccgtatgtaccgatgctgttaatgatccgaatgatccccccagagagcacgcgcggattttcagcaaggatggtgattcccttcattaattcctgcgccttttcccgcttatctgcctttttcttttcaaagcggtccctatttaaaatcaaagcaaaaaacgcgccgaggcagacccagaaaattgaactccacagtgtattcaaatagccgaaggatttgatggcccagcttgaataccaagcaccgaatacaaacatcccgcagcaatatgcaatccagaaccagccgaccgccgtactgagcctgtttttcggcgaccggtaaatcacccatgtcaaaaaagaataggcaaacagcggataacccagccctttaataaaatacgtgacatacatcaccggcaaattaagattttcaaatccgtatgcgataaacgcggctgttccgataacgtaaaacaacagccccataaacatcgtccgctttgcgccgaaggcttcgaggcagacccctgaaaaccaagacgccacagcgagagaaacaccgtaaaccgtaaacagggctgctgattgctgtaccgtcaagccgttttcaactaaaaacgggctgagccagccttgttcaaggccgtcccccatcataaacagcacgactcctaaaaatccccatgcgagctgtttcggaattcctattttattaagcatttttgttcctcctcagcaatctttcatgttgtcatctcatccccaagtcaggctttcaccgccggctgaaaatgagtaaataatttttgcgtatatttccattcttcatataggaagagatccgtctgatccgcttccggctcaattacctttgtgcggctcgaaagctctgctttcacaccgagagcttcgttgcaaatcatcgccgctcccattgcggatgcctggctgaacccctctctcttatagattttcttttggagaaggttagcaagaaactgcgtcaaagcatcactttggaaaccgccgccgcacaccttcacatcatcttgtgaaaaggaagccacctctgttaacgcctcatagttccatttgattgaaaaagcgatttccagcagtgcggctttgacaaaatgggctctgcttaagttttgggacagcggagcgtcaaaaataaatccgccttttgccagtgcgtttttctcaggcgataaataggagcctaacgcagaaatacaggcatgatcatgtttcggcagacttgcgatttcccgttccataacgccgtaggattcattcggataaaaaatggattttaatttttgataattgagtcctgttacacccggattcgtttcaagaagccattgaccttcttctgtatggcaattcagccatgcattctttaaactttcggttccggtctccgctgttatctttgtaatcggcgtcgtcgtgccggatacgatgacgatatctcccggctttgcatctgcacttttgatggcaagctgtgtgtctcccccgcctgcaatcacaggcactctttcagaaaggccgagaaccgccgctttcttaaacgttaacattccgacaaccgtcccagatcggacgagtgaaggaagaatggcagaaggcacaccgaagatgttgcataatttctctgaccacgcctttttccttacgtcaaacagcagtgtttcagcagcctgtgacggttcatagcttaaaataccgctcagctcaaatgtcacccagtcactgatgcttgtgatgtacttcacttctttccataaagacggctgtctggcttttaatccgacaagtttcatggcggaaaataaagcgctcggaagacgtccggtttgctgatgcacttcttcttttgtctcaatcccgtcttcccattcacggcctctgttatcaatgttgggcaaaccgagaaatgcctttttacctttattgatcagaacaattccctgcctctggcttgttgaggtgattccgattaatgtaatatgtgggcttttggcaataaccttccttgccatagcgctgatttgcttccatatcccttccggtgagaaatatcgtccgtccggataaagcggatccgtcacatattcaatgtcttccctttcaagcgcggtcacttcgccgccggcagtcacgaccgcgactcgcgcattccccgtcccgatatcaaatacaaggtagcctttttgttcagccattacagcctcctccttccgtttcaagttctcttttgttataaagttcacgtattgagcaggtttgatcttgtttccatttgaaaagcgcttcatttaaaatcttcacatgatgatcttccacttcaaatgttgcgcccgctaaatggggagtcgctaacacattcggcaaagagatcaattcataatcagaagattcaggcggttcgtgataaaacacgtcaaggatcgctcccttaatccgcccttctttcagcacccgcagcagctcttccctgtctgtaaccgccgctcttgacgtattgacaaaaacagcttcctgtttcatcaattgaaagtgccgggcgccgataaggccgatggtttcttctgtgcgcggcaagtgaacggaaacaatatcactttcagaaaatacccgttcaatcgtcgttttttcatactcccggttttcatgatggacaaatgggtcatagtaaagcaccctgcagtcaaaagcggccaataaccgggcgattctctgtccgacagctccgaaaccgataaggccgactgttttccccgtcagctcatttcctctgaatttgacataagcctgcaaataatcaccattccacttcccgtccttcagccactgatgggaagaatacgtatgacgcaaaaatgaaatcacatttccgataaacatttcagcaacagcctgggcattgcgggccggtgtaaagaaaacggggatttttcttttagtcgccgccgcaatatccacgttagacggcattcctctgcagacaccgataaaagcggaatcgggcaatatgtcaataacacgctcagacacctcatcaagttcagtaataagccccgacgcgtttgtctcttgaatcattcggattaattcatcttcccgataggcccggccgtgcttcttccacggccggtgcacagtccggccgaacagctcagtcagctctttcagcccctcgtcgtgatatagtgcggtaattaaaaccgtcatggtgcaaaacatccttttcacataaattttttcataaaaaaatctctttccccaaagaaggaaagagattcatataccgtctttatgcgcttgaagcgcacaaatatgtatagatcattctttcctatctttcaagcatacgcttgctggaattggcacaataaatgttgccgaggtttcgtagggccagtccctccacctctctggatagaaaataaaatgatgaaattgtcaggctgtttaaaagaataaactcatcatagaaaagtctttccatgatgtcaacactttttttctgaattgacgttcgattttgaaatgttataatgcttacaatataaacaaagaggagaaatgggctatgaattctgctgcaacacagccgaacggggtctttaagtcggtatgctcactagactgtcccgatcaatgcggcttgcttgtgacaaaaaaagacggaaaaatcgttaacattcagggagaccccgatcacccggtcacatcagggaatatttgcaacaaagtcagacacatggctgagcgcatttatgatgaaaagcgcgtaaccgttccgttaaaacggatcggtaaaaaaggtgaagccgcgtttgcgcctatttcctgggaggaagcgatcaatacgatcagtgcgcgctggaaagagcttattgccgaagaaggagcggaaagcattcttccgtacagcttttacggcaatatgggaaaactggcggcagagggaatggaccgccgttttttccatcgtctcggagcgagtcatctcgaacggacgatctgcagcaaagccggttctgaaggctataactatacaatgggagaaggagcgggtactgatccggaggagaccatacatgcaaagctctttattttttgggggatcaatgccgtcagcacgaatatgcaccaagtcatgattgctcaaaaagcccggaaaaaaggggctaaaattgtcgttatcgatgtacataagaaccaaaccggccggcttgccgattggtttattcccattcgccccggcacagatgccgcactcgccctcggtatcatgcatgtcttattcgacgaaaaccttcacgatgaagcatttctcacagaatacaccgaaggcagtgacgaattaaaagcgcatgtcaaacactatgatccggaaacggtttctgctattacaggcgttaaagccgacgatatcagacgccttgcgagaatgtacggggaaacctccccttcccttatcaggatcggaaacggcattcagcaccatgacaatggcggaatgatcgtccgcaccgttgcctgccttccggctgttacaggacagtggctcaacaccggaggaggcgcaatcaagcataacagcgcggtattaaactataacagacaagcgctccagcggcctgatctgctttacggcaggaagccacgatcatttaatatgaacaggctcggaagcgttcttttagaaacaaaaccgcccgtgcgctccctgtttatttacggtacgaatcccgcagtggttgcgccggaagcgaataaagtcagaaaaggcctgatgcgggaggatttatttacagtcgttcacgatctgtttttaacggaaaccgccaaatatgcggatatcgtgctccctgctgcatccgcttttgaaaacacggatttttacacgtcttactggcatcattttattcagctgcaaaaaccggtgatcgaaccctacggggacagcaaatcgaatacggaagtgttccgtttgcttgccggagcaatgggatttaccgagcaggagcttcaggattccgatgaagaattgatcagacaggcgctggactttcccgacaatccgtatatcgaggatattgattacgaagcgctctcacgccattccttcatgaaagccaaacggaaaaaaccgctttttccgggaaagctcaagacaccgagcggaagaattgaattatattcggaaaagatgaaacaagacggttatccggcgctgccgacacatatccctcttgaaagcgatgacgattttccgcttttatttgtcccgggaccgaatcataattttttaaactcgacattttcgaataacgaaagacacgtaaaactggaaaaagcgccaaagctttttattcatacagaggatgctgtacgccggaacatagaagacggggaaaccgttagagtttggaatcaccgcggcgagtgtgaattaacagtttcagtcggcgaacaggtgcttcccggcgttgcagtcagccaaggtctttgggccgatatggatgataaaaaacagctcgtcaattcgctcacgcccgatcggctggcggatatgggcggaggcgctgttttcttctccggaaaggtgcaggtggaaaagctcagcaatcaaaaccgtccgcaataaacgccgggcggttttgatgaaggctgaatcctttcggccggcttcaacgtataaaaagtgataacgtttattggaggtttgctgtatggatatcataccggcatcggaatcgctttagccggatatttcataggagacggattgaaaaactttaaatcacctgatcctcatgaacacactgaccacattctcattaaagaaaaagatctgcacttctatattggttattatttaggagttacgaaggaagaagcaaaacaaattgcccgacacctctgacattccgcatatcacgagaaacggaaagcggtatgtacagaaaactgcattaagagaatggctgacttccatgctggaaaaagaataacagctgccatgaaaagcgggaagagtttttctcttcccgtttattaagattcgccgccctgcctctcttcaaccccaaacatacgatagatatcattcttacgtaacgaaacatccccttctttagatttcaaataaaaccctttcttatataaccgtatgacttcctcatatgtaagctcatgacgaaggagcgccattaaacgcccgtctttttcatcttgtttattgaaccattcatactgttctgaccagttcactttctgcatgtcaaacaccttctcactttggattaatgcccttttcgcattcttttacttattaccccttctgtaaacattccgattacctgtgacatttttgaaaacagccgtaacccctcccattagtcaccatgttgacttgtttctcatttcgttgtatattataattgtcaacatggtgacaattcagataggagataccttatggatattaatttattaatgaaggaactgcatgttatgcaacaaagttacgcatcattattttcggttgtcaataaagtgcaggctcggggggacgaatacttagaaatgttgacttcccgacagcacatgactcttattgctattgcccatttaccgacggaagataccacacttatgaatatcgctaaaaagctgggcacaacaaaacaaaccgctaacaaattaatttcaagcctcgcgaaaaaaggatatgttcacactgtgccaagcaaactggataaacgtgcaatcaatattgagattaccgctgaaggaaaaaaagcgttaatttcctgttcagaaaaatccacctattttttagcggatatgtttcatgacttcacaactgatgaaattgaaacattctggaggctattgcaaaaactttatcgttttgatggtgaagaacaggatggttttgaagaaaaagcacatttgaaagttgaagatcaggcacaattcatctcagatgactatgaagaaaaaatcatgactgaattttcaaaacggcgatatgggagtgcagacgatgaataatatgctttatcgaaaagtaaaagaaacagaggataaaatgaaggaaaaatgctatgagctgaaagataaaattgatcaatttatttctcatactaaatacaaaattcattgcaaccgtaaactggaccgagccggcaattatatatcaattgccattggactctttatcctaactgcctcatggctgaccgcaacacaatggctgctttggataggcgcggcgagtattttgagtaatgcctgcttgctcattataaagcctgttaaaaattgaaaatctgaaaaaagctctctaaaagagagctttcttttattaatcgtcccagtcttcatcttcttcccagttttctttcatctcatgaagtctttcataaaagaactttataaaatgggcagaattaagttctttatagccaccgaattcactccaaataacaactggacattctccttcactgttgattttattggtatctaaacaatacccaaaaaaatcaacatgttctatgactactaagccacttggcaatcccctatattcatgatattccctggttgtttctacaactgaagcaccgccaaaatcatagcctaataaatcgattccataaaccccgccagaaccatattttctaagaaaccatttgtagctatctggcaacgtgacttgaagatcttgctcaatttttaaaattttatcttctccaatcccacccgtaaaatctttttcttttgcattatcagctatgaattcttttacttttaaataaaaatccatggtttataaccccttattctttctcatattgttttgctctccacttccaataccttgtcttaaagttattgtactgtttctccaggtaaacatcattccggaagctttctccattacctttaaggccatgtattacgtcgctatactttgtatgtaaactattaggtatctcaagcaacggtccactttcttcttgtatgaggtgatgtaagttaatctgtgttccgtctttagcataaggagacttaccatctttcattaattccaggttggtttttccttttggagttttttgattaatatcaatgtcctttaaggtatagactctacggcttacatctctaatttgtcctttaacttttactttgccgtctatttcaacagcaccatacttttctttatttaaccaaggaaggtttatttcttgaccagtaaacggctttctcgttccatccgggattttctttgcattggtcaaaagttcatttttaaggttttggctgtcaaccacattgtatggtacgtcacccgacagagcaagcttatacttaggattatacggaagcaaatctggaatcttgacgtccttaattctcttccctgcctgtcctgccttgtttatgaccttccccgccgcatcagctttgttaacggctcctgcgcctttcgttccgacgacagccacagctgctgaaccaattgcatatgtcacccatcttgatctggagtaagcatctccatttaccatatccttttgatacgattcctcgattgctgctgaaacagcatcatatgttttaacaggatgaagtactgcattccccagtgctgacaaggtttcccccggatcggttatgaagtcccatagaccggttaccgtgtctttcccgacatcatataaaccaacgccagctccttttaaaatatcccaagtcacttctccggcttcttccatctgttttgcttgttcaagctgaatgacatattgctgctgagaaggttcaaagttttcatagccgatcttcttcgcaatttccaaatattcatccggatcggtcacaccgtcagcgagctttttcttcagatccttgatttcccgctcttttgcttcttccttcttaaacgttaaatatgtgtctgagtgtcttgcaatctcgccttttttcttatgtatgtcactttccctgtacgccttggcgttatagtgaagcggagtggcgtttttccctttgcctgttgcgttttggagctgctgaaaatcggcctggatgaaatgttcatttgcctcggtttctgcgtattctttcgttagattgtgatcaagctttccgagcttatgtatggtatcgtcccgttttttgtctgctgattccagcttttgatcgacatcttctgtagagaaaacatcaagatgaatgatatctctgatttcatcaaggatacctttcatttcattgcgctgctcctgcatgatggcttgtgatttattcttcgcatggatcagctcgtgttctaaaaaggactcttccacaaacgaatcggccaatccggcatcagctacttttcctgaaatactgttaagaaaagcaattttcatatcgatcagatcaagccagctgtctgtgacaccagcgtgatcttggaagaatgctttgatgttatcagcacctttacctgaaaactcactgtcatctaaatcagccattccctgaaaagctttcctgagattgataaattggtctctaacctgatcatattcttttgctcgtttctccgctgctgagattaacgaggatgcttcaaatactttcatttacggctcctttctgcttctttccgtctaaattttaccataggatataagattagatgaatctcttgcatttgtcgaactgctttattcaagatcataaaatttcaaagaaaaccttacacgaaggaatctgggatcggcaaaacaaagccagatataacatatattaaaaaatctcttgcatttctacacccgccatgctatattgatatagcgatgagctgaattgtgtaagccgatgcacatgcccttgcggcacacacgaatgtggcgtgtggtgtatcgcctcaatacgcaaaagacgtttgcttctgcaaacgtctttttttattatccgattttcgttccgttcggtactgtctgctctggcgtaagcaggacaacgtctcctttttccgggatgccgccgagaacgagaacttctgacttaaatccggcgatccgccgcggcggaaagttgacaatagctgtcacctgtctgcccgtcagatcacccggttcgtaccgttttgtaatctgggcgcttgattgtttcatgccgatctcttcgccgaaatctattgtcatcttaatggccggcacctttgcttccggaaatacttccgcttttacgaccgttcctattctgagatcaagcttgataaaatcttcaatgactgccatatcaaaaactccttttttacaatcatgttaccaaaaaaagaagcagtttatttaaccgattttcaggattatttatcagattgaaaggtgtttcggaagacacgcggcgttattcccttatgtctgacaaaccatctggtaaaggaagacaaattttgaaagccgacctcctgactgatgtctgtcagccggcattttgtttcaataagcatttgttccgctttcttcatacggagctcagcaatataagcttgcgggcttttccccgtctgctttttaaaccagtcggaataatacgccgggtggtaatgttccattgcggcaagctctttaattgtaaaagtctttgagagatttcggcggatatacgcaattgaatcatttgtacggttttcttgtatcttttcagcaatatattctgcaagcagactcaatgaatgagccgattgctgctttgtctcttctgtcagcagaaaccgaatcgatgtccaaaaaggatcaagcttattcagaacgccgggggcaaatgaacctttgaaaaaatatgccggtatgtcgagaacgagacattcatttcgctccaaagaacggaaccgatgttcatgcccgggcggaatatacaacatttgatcaggttttaatctgattttacgtctttctgtctccaggtccagctgtccttcgagcggaaagagcatttgacagtatgtgtgtgcatgagaatcaaaaatatgtgaataggtgcgccgctcacaaatgatatgttgtaatgaatccatttgtccctcctttttacatgatgcgtctttttatttagtttacataataatattattgtttcctctcctgcaaacctcttaggaaagcaacaactgcaaacttccggctttccttaattgattcggttaattcaaatgcactctgttttctcaacacggcaaatccgtgaagaaggctcctcagtcctctcgcagcatgaatcgcagtgtcagactgtgcatatccgttagctgtcagctgcctgacaacaagccctacaagcaggcttgacagattctcaatccggccatcttttatcttttgaaatgttgcgtcatataatccgggattggcttcggcgaaattgatataggcatcggcgagagcaagcaaagccgtttcacccgtcagtccttctgcagaggccgccattttttcatataacatagttaaaccggagacagccagctctgctttaattccttgaaggccattgacaaaattgtaaagggaaggcggttttacgtttaaggactttgcaacagccgcaagcgtcacttcattcagccctttttcgtcagcgatgcctgctgcggctctcaatatcatgtcaaggctcattccgactctcggtgacattatgatcggcctcccggcaggcttcgttcggcttcctcagcagcctcagccatcatttcaacgggattgcagagaacatttccatgtccggcggccagactgcttggttgatgagcgataagcgttcttgctgtttttacagcttcttctttattccacgtagcaaaagccggaaacggaaatttccatttcagcttccctgaaacagcaaggccgccccgtacttgaaaggcatctccgacgatcagcatatcatttctcatatctttaaaagcgaggcttcccggcgtatgaccgggagcgggaatgacaagtaaagatccgatccgctcgccgcctttcagcaggcgatcaggttcggtctgaacatttttcggcactcccccctttatcggcgtttgtgcttcatgctcaaataatgaagtgtcacctttcagcaagaaagaatcccgctcagaaatacagacggaagcatccggaaattccgcagctaatgagtcaagcgaaccgatgtgatccccgtgcgcgtgggtgagtaatatgtcattcagcggcttcccaagctgccgcaatgcttgtttgattcctttatgactgttaggcagtccggcgtcaatcagggttactccttcttcttcttcaaccaaataacaattcaccgggaagagcgcgggaaaaaaagtcagctgccaaacggttccgtattgtaagattctcatcaacatccccctaaaaactaatatcattagttttattataactaataccgttagtttttcaagagttttctgtttaaatcctgaaaaaggcgcgggcgcttctcttatgcaaaaaaaagaaacgtgcatactgtgataaaagatgctttcagcctgcgaataaatcagactactaaaaccagccggataagcatacactactcaacggagggggagttccacaccatgcatatcacacttcaaagcatctgccctgtcttaatgattgccttttttctgtataaaaaggtgaaacggtccgtcggctttcagcctttgaaaccccgctggctttatacaagaatgattttgttttcattgctggccgcagctctggcgtttttcagcatcacacacccggctttatacggccatcttatattcggcactttttgcggctggcttctggtcctgtttgcaaaacggaacatttcatttgaagaacgccgcggaaaaatgtattttcgcactcacctgtggattgaacttattctattaacgttattcctatcgagatttttttatcgcgttattgaaatgtaccgggtcacagcggactttacccatccggaggcatacagccaaacggtcggggccgatccgctgaccatcagtatcttttatttcatcgcagtttattacagcggcttctctttttatgttttaaaaacgagcagagaccaaaccaataacagtcagtacggctgacatccctgtctaaaaagcagggatgttttttaatcgtgccgcgtatggtgaatcatttgctgaagcacatctaacacatgttcatcctcaggagaataataaatggatgttccttctctgcgtgatttgacgaggcgcagatttttaagaaaacgcagctgatgagaaacggtagactgcagcaaattcagcttttctgcgatatcatttaccgcgtgctcaccctgtgacagcaaatggagaattctgattctggtcggatcagacagcgccttaaaagtctgggcaaccaaaaataaagtttcctcatctaaatcgacagcggggtcatttttgtttccggattcgtgaaattcagtcatatacctcacccttcttttctcaagtagcccaattataccaaatgtcaattgatgcagatacatcctgcgcctgacaaaagaaccgttattttaaatttatgtttcaaatacgggtttccgcttggtttcgcgcattcatctgtgtcataatgaaaaagtcataatgctcctgaaattgagggtgaaacacagtggagaaaaagaaaaaaggctgtttcgctgccgcgggtcttatgatgatatgtgtttttgtcatggtttccttcttcctcattctgttattttcaaataatgaatggctcaaaagtcttccgtttgatgtcaagccgatcgtccttgaacggctgacagattacaaaccgcttgttgaagacgaactggatgaaaaaggactcaccaaatatacatcgcttgtactcggcatgatatatcaggagtcaaaaggaagaggaaatgatcccatgcagtcttcagaatctctgggtttaaagcgaaatgagattaaaaaccctcaaaccagtatcaaacagggaatcaaacaattcactctcatgtaccaaacaggcaagaaaaaaggcgtagacttggatacgattatacaaagctacaacatgggagccggctatattgattttgtggctgaacatggaggatcgcatactgaggaactggcaaaacaatactccgagcagcaggtcaaaaagaatccgaaactttacacttgcggagggaacaaagacaatttccgttatccctactgctatggtgattacacgtacgcagaaaaagtaaaagcaaaaacaaaaaccgttgaacaatccttaaatgtaacaacacttgaaacgcttgaagagtaaaaggcgccctgatgaggcgcctttttcaatcaatagaaaaaagccgcgcagagcacggctttttttaataatacggtgagatcattaagtatacaatgacacccgtcagactgacatacagccagagcggcatcgtccatctcgcgatttttttgtggcgctccacctgcatactgaatcctctgatcagcgtaaacagcgcaagcggcacgataatgaaggaaaggcaaatatgcgtaattaaaataaagaagtaaatcccgcgcatgatgccgtggccgccgaataaagtattctcagctatcgagtggtacacgacatagcagatcaaaaacagcaaagtcgtcgtaaacgccgctaaaataaagcgtttgtgcgcttgaatgtttttttgcttaatcataaagagcgctgccagcaaaaagataaacgtgaagctgttaaaaatggcatttaacatcggcagaatatgaatattggcaatgctgacctgtcccgatttcggcataaaaaacagcaccgcaattaatccgttgatcagaacggtcaatgtcagcacgacaccggtataacttttaggtttgttttctgtctgattcatcttatgacctctctcaattttactgactatccaaatggtatgagaattcagctttgatgtcaacggtttcgcccgcttcgtcagaaattagacaaacttaagccctaaaaagaccggatgtttgagacccggcctttcgtcatattatgcttccttcaacagttcttctatcaccttatgttcgttttcattcaacagattttttggaatgatccgatcaatcggtttattcatgtgctgatcgagaatatcggctgtttctttgtcccctgcgattacgagacgctcccattggtgtgaagcggccttttgatcaaggtttgaagccaatcgtttatacagcctgttttggttttcttcgacgtgggctttggcggcgtcttcgtccatcgatgcggagcttccgcttacatcctgcggtttccacgattcattgatgacgtcgtaatgataatgctccactccttcaatttttccgagtacggtttctatgatcttcacttcattctgctgggtgagaataaaagccgtgctcggaaattgttcacgaagaagttctaattgatcaaggacagccgtctcttcccaataaaatcgtgtttcgacaggcacctgcaattcaatcgtctcccaaataccgccttctcccgatgcaaaaaatacgagacttcgcggcatctctttaccaagcccctcgatatattgatagacacgttccatgatgcggacgagagatttttcttcttccggatcactggcagacagatactcttttaatctccgaaaaccggttttcaaggcgattttccactctcccccctgctgatccggatttctcatatccgtatttacatataaggaaagcattttatcaggagattccgtcattacgtacttcaatttgccgatgagtgagtcaattgccattatagattcctcctttttccgctgctcactgttcctttccctatccgcaccgccttaaaaacgtcaatccacatataaacggcagacttttctaaaaaagtttttgcaaaacccatttacaaaccaagacatcatttactacaatggatacttgtgtttaactaagacttttacgctgtgaaaggagtatgattttgtttactgcagaagaaagagatcagaaagagctggaaaaagagcttcataaacttgaatttcagattttcagaatgcgggaaaatctgatagatgtatcaaaagacgcgcgagtgcttggtattgatcaatcgaacaatgacgattggatcattgtttcctcgattgatgatggccaaacatgtaagattatgctgactgactgtgagtcagcctaccggggaagaggctgtttttcactgatcgcctcttattatgacaatgccattcatatcggggacattaaaggcccgccgaaccatggctacggctcgatctgcatgaaatttttaaaacatatcgccagagagcagaatatcccgaaagtgacgggcgacatcgctaagcgtgattgggatcatgtcgacagactcattcatttttatgaaaagcatcactttgatgtctggattgacaatgatacgcaatcaggcggcattaaatgggtcgacctgtaaaaaaataatagagaaatcctcttttatatggtgtaatagattaaaccatataaggagggttttttttgtatccggaaaaattgaaaaaaggtgacggcattcgtattgtgtctccggccacaagcatgtccgttatgtcagatgaaaatataaatgccgcgaagacaaaattggaggagctgggcttttgtgtctctttttcagagcatgcgaaagaaataaatgaatttgattcatcatccattgaatcgcgtgtacaggatctgcacgaagctttcgctgatcctgacatcaaagcgattttgacgacactcggcgggttccaatcaaatcagctgctccgctatcttgattatgaaaacatcaagcggcatccgaaaatcctttgcggctattcagatattaccgctctcggccatgccatatatcaaaaaaccggccttattacatattccggtccccatttttcttcatttgccatgaaaaaagggctggactataccattaactctttcttggcctgctgtgcttctgacagcccgtatgaggtaaagccttcatccgagtggagtgatgataaatggtatttgaaccaggaggacagacgtttttatcggaatccgggaccgctcgttattcaacccggatatgcggaaggaacactgatcggaggaaatctatgcacgctgaatcttctgcagggcaccgaatactttccggagatggaacaagtgattctgtttatagaagatgatcatatgtcggacattcatatgtttgaccgggatttgcagtcactcatccatcttcccgctttttcagccgtgaagggaattgtcatcggacgtttccagcatgcttcaaatgtgtctgaggaggctctgcgtgccgtcatccgtacaaaagaagaactgtcatccatgcctgttatcgcaaatgctgatttcggccacacctcccctttgatgacattcccgatcggaggaacatgcaggatagaagctggctcagaaggcggacggatatggatcgatcggcattaatacataaagacgggaaaaccgccccgtctttttattttgacgccttatgccgcggcgtgcgcggagcgatcataatttgtccgccagccgctgccgttacccatacggaagctccttcataaaaatggctgatctcttcattatatacggcgtgtgtcagttcacgtttatcatgcgttccgtcttggttttttacgtttaaaataagcacaagctcgtgcctgccattcttcatcacgccagtatgtctcaccttttcaataacggctggccttcctctccctctgtcaagcgcctgaaacagcctgacagcaggcatagacagtccgataacgagcacaatggcgaaagcggtgcatatacctgcttgaaacaccggtgattctgtgaaggcattccataaacatataaattccggctccatcagattcatacatcccttcagattccgttttcacatccattccttattatattagagaaacgctttttctttttccgcatataacgattatatacagtcaaaaaagggaagaaaaaaagaacacaaagcatttcgccttgtgttcttcatctctatatgaaactagtctaatactttaacatttactgttctgacgccccagttgttagcgtcacttttctttgcaacaaatacgtcaattttatttcctttaattgcgccgcctgtatctgctgctgttgccactccgtaaccttcaacataaaccttagagccaagcggaatgacactagggtctaccgcgatgacttttgcatcagggtttttgtttaagtcaacaccggttgccgttacaccggaaatgccgccgtcgttagcagagtaagcagttgcagtcattgtcagctgctttttaggctcttgttggtttgtatttgattgaacaggctgctgttttgcttcgacagccttcgcttcttgtttaggttgttgttcttgaacaggttcttgtttaggctgctcgtttttgacagcttcttgtttcggctgttctgtctcggcagctggtttttgttcagtttgcggctggctggcttcttgagccggctgtgcagcctgagcctgacctttcacatttaacgttgtgcctgcgtaaattatatctgattgcaagttattcaagcttttcagattgccgactgatgttccgaatttctgagcaattttccagaggctgtcgccctgcttcactgtgtactgcccagatgtggttgtttctactgaagaaatagtcagtttctctccttcaatgattaaatcagaagataactgattccattcttttaagtcctttaggttcactccgtttttttgcgagatcccccagagcgtgtcacccttttgcaccgtgatttctttagcagaagcgtgagctccaaatgcagttgttgaaattgctgcaactgcgacaaaggacataatcgtcttcttcataagtaaatcctcccttgttagctttttattggcggctaacaggtgatatcgtaacatatgaaaatgtcagttcaataacaaaacgatttgaattagattacagttcctttacatgaaacatttctctcgcttggtaagtcttgctgaaaccttgatacagcaagggttttcaagcttctgatttttccggcgccaatgaaaaacacaatgtgcaaatttctaaaaaaactttttttcactctgtttctcttacataatttcggatttcttctaaaaaaaccgctccgtatttcaatcttttttgttccccgaccccttttacggaaagaagatcctgatccgttttcggaagtttcgccgacatttcttttaacgtctgatctgagaacacgacaaatggaggcacaccctgttcagctgcaatttctttgcggagacgccggagaagctcaaataattcatcattctcggtaacggcggcggcctgtaaggcttcttttctcgcgactgcgctttttccaagcagaacgtccctgcctttttgggtgaccataagcgtcggaaatgtgccgtccgccattctgatatattcatcggaaataaggaattcgataaaatcactgatttccgctgcggattgatgcttcataatgccgtaagtggacaggctgctgaagccgttttccagcacttttttattttttgacccgctaagcacctgcgccaccatcgtttttccgaagcgctcattcattctgatgatgcatgacaataccatctgcgcttcttttgtgacgtcatgggcggtccttgtatcagtgcaattgccgcatgctccgcaagcttccgcctcatcctcgccgaaatacttcagaataaaccgctgcaggcaatcttccgtatgacagtaatccaccatctgtctcagttttttgagatcctgtttttgtttttcttctccggcggccgattggtctattaaaaaacgctgcaccataatatcctgcggcgaaaacaagagcacacactcgctgttaagaccatcgcgcccggcccgtccggcttcttggtaatagctctccatatctttcggaatctgcgcgtgcaaaacgaatctgatgttgctcttatcgattcccattccgaaagcggacgtagctaccatcacttgtatctgatcgttaagaaaccgctcctgctggtcttttctgtcatcatccgccaatccgccgtgataacggccggcattgatgccgctgcgttttaatttctcatataaacggtcggtttcttttcttgtcgctgtatatataatgccggcttcgtgtttattcttttccagataccgctcgataaaccggtctttgttttcgccctttactactttaaacgttaaattctctctggcaaaaccggtatatacagtttgttctttcttaatatgaagctgcttgcagatgtcatcatgaacctcaggcgtagccgtcgccgttaatgcgatgatgacgggcggttcttttaattcattaaaaaggatttcgatattccggtaactcggcctgaaatcatgtccccattgcgatatacagtgagcttcgtcaatggcgacaagaggaaccgtaatattctgcaggatgtgaatgaattcagaagaagtcaaacgctccggtgtgatgtaaaagagccggtaagccccttgtttcaaaccggtcaggcgctcatgaatgtcacggcttgtctgggtgctgttaatataagctgccgcgatacccgcttcttcaagcgcgtcgacttgatctttcattaaggaaataagaggggaaataacgattgtggttccttcaaacagcagtgcgggaatctgatagcagattgattttccgccccccgtcggcataatgcagaccgtgttttttctctcctctgcaactgattgtatcgcctgcttttggcccgcgcgaagactgtcgtagccaaaataatgcgccagaagggattgggctttctccagcatatcttgtaaaacctcactttgtctttgattcttttattttatcatactgataaagtacgctgctcaagggaaattcaaaataaaaagccatctccgcaagggaaatggctttcgctacgtatgccgtacgcaagtaagaaagttttaaaccaccactcctcaaagtgggtgtttgcagaagcgttcctgtcgtcctctgcaatggaggcatgacattccggcttcgatataaaactccctattacagcttaaaggttaaaacttaattaacaatacgaacaatgtagcttctcttatatcctacaccatcagtcgtattttggcaagagggttaattcttttacagaaaaccttttttctttgtgaaaaatgctttattctacataaaaattgttttttcgacaaaatatcaatatatcaatataagatcagatcaaaagcagccgccagtttcttctataatagaaaaaactctcacaccctgtaggggcgcaagagttaatggaaattagaattttgcagccagatctttcgcttcttgcagtcctttttcaatgatcgcttgagcgttatccggtgcagcattatggccttcaacgacaacagtgtgaagatcttggacaccccagaaaccgagaacggttttcatgaagtttaatgacatttcaagagatgccatcggtccttcagaatatacgccgccgcgtgcgtttaagagcgctacttttttatctcccatcagacctttagggccttcaggcgtgtatgtgaaagtaactcctgcacgagacaggtaatcaacataagtatgaagcacagcaggcactgtgaagttccaaagcgggaatgcaaacacgactttgtcagctttgacaaattgatttaagtaaatgtcagcagttgacgcttgttttttctcttcgtctgtcatttcaattccttttgaagctttgaatgttccgttaatcatatctcttccgaggtaaggaaggttttctttatgaagatcaagttcgatcacttcatcattcggattgttttctttataagcagccagaaacgcttcgtataattttacggatacgccttcttcagccgtacggtcacttgattttacaaataatacttgagacattctaaattcctcccggtaatcttttaatatttacttacaaatagtatgttactttcttttttatataaagtcaatgattttatttcgattttgagattttttatggaataaaaaaacaggtacatatgaatgtacctgctgctattattgtgaatcctgctcgcgatccaggatttcgtatgtttgtgagcttttttgatcaacggtttctttatttgagaggtctttcacctgctcgtgaaattccctttcatatgacggagcgtctgttttcacatccccttctgtttctcgctgcgcttcgacggtcattctggcgtacggcacggcttcaagtctttcataaggaatttcttttcccgttttctcgcaaatcccgtatgttcctttatccattcgttcaagcgcggcgttcacctcatctaaaagattctgatcgacaccgtccagcgtctgattcgtgaccctgtccaaataaatgcttccgtgatcagctaagtggttatctactccgttcgacagttctcctgtgtcttcactcattgaatgattttcttttgattctccctgaagactttcctttaaatcgattaatttatgataaaggctgtcctgctgtacttttgataatgacatattcatcatctcctttttcgtctgtattcttcgctgtatctgctaatacataccctcgaaaaaggaggctgaaacaacggggtcaatgctttctccccctgatggtgacattgggtgtctgctgctttgtctgtcttttttctttcgcagcatcagtttgcgggttgtcccgaaattcttcagcgcaggcttgtttgagcctgtgcgccggtgtatggtaagtggcgccgatattcagcataccgctcagctcttctatactcagcttttcaaaatcaatattgtattcaaccttgtccactttgacgtgctcaatatggacatatgttttttccccttccaccgtctgcggctcaaaatgacacttatcctgaagctcatcaagctgttgttccactttcttaagccggtctaattcctcttcacacacttttttgaaaatctctttcattatttttttcaaaaaaaatcacttctttccccgtcactcttggaaagttctatgcgtcccgcattgcgaatatataaacatgatatacaaaaaggaggcgaatcatgatgttttttccatccgttatcaattttgagtatataaaaatgaacggaatcagcggcggagcaacttttaacaccggctcttccgttatggtgagaaacacagcagccaataaaagaaatgaagggtacggtgaacaaaacggtgattgcaccgttgtcgtcatccctatcatgagtatcgatgattcagatctgatagatggcacagcaaacaagatcagccttcgataatgatctggcttgcatcccccagatgtttagcaatcgatatatataaaatcccgtctttgaataccgcctgcattcccttcgttccctgagcggaatgcggaaggtcgagttttttttcaaaatcgccgtattttccggtcttctgtttaaaatcctgttcattgaaaaaggattttctcgtgccttttacgacgatatattctccgtaggacagcagctgaacatcttgtttccggtagccgggcagatacagtaaaaattggagctcatcatgggtttccacaatatctataagaggaaaagcatcctcatttcttttcatttgcccatctccctgttgaaagggaaaatgagaatggccgttttgaaatgatttcagttgttcatcatcaaaaacgtttttccaaaagtcgccgccggacatgttttgcgccatttccatccactgcttcatcttatcgaaatccatttttatcgcctcctgtctaagcatacggtcataacagccggcatacacctgtattaaaggaggtttgcctgtggttcaaccaactccatatatcaatattaatattttcatgttgaaaattaattcctttgaaaatgcttcagcggtgaatgtcggacaaaatttactggcggaatggcagaattctgataaaaagaatcagggatacggacagaacttcggagatgcaagcggcttcatcggcacgaacggcaaagtggatgaccgggatcaaattgattctccatctacctttgagtctgcatgcgataaaatccctgccggaaaaggaggcccattatgatgttttcgccggttttggtaaatgtaggaggctttaaagtaaatgcagtcgaccgcggttcttccattacgatcggcccgtatcagcaaatcgattattttttatccaataagatcaactacggattcggtgaagaaaatggtgatttggcgccgatttatatccccatcagttctattgctgatccggatctcattgattcgaactccggaaaaacaagcattatataataaaaaggccatccgcatgcattcggatggcttttatgtgatatttaactgcataagtattttgttaagatggcttgaacctcagtcaagtccgtttcttttgcaaattccaattcgaaagtttttccccttgtcattaatacaagcccggtatctggatcaaacatccccgcttcttgaatggcgaagctttcaattgttttatatggaagaaatacgcgcactttctttttggagaacattttattatcaaagaaaatcactcgtttattcgtaaagcatatttggtcaacccgcagtttataaatcgtttcgatccgttctccctcaacgagcaaagcctccagcttttttgtgtcggttgatctgctgacagaaaaaattcccaatgaagaaccccactttctgcttctatactattgttttattacaatcataaaaaaataagttctttatccctatataagaatacgacatagacggcatttaaaccattacgaacagattacatttttagaacgttcatcaaaaaagcccttcgcgaaaggtgccgctgttatgaagtagtacggttcagcgaaagaaaaggtttcaagaaaacggtatttttttcgaaaagtcagttttttattctcgccataaaaaaccgcggcttttccaatgccgcggtttcaacaaaacatcaacgatccgtatcttcaatcgttccttctttataggtatctgaaatttgttccatcgtcgtgtcggtgccttcttcaggttgcacttgctggagctgatctgatgttttattttgtttgtcttgctctgtttttttcattttgcagccaccttttatatgtagtcttttttagtatggctcaggcaaaatgaattcattcagctttaaacttcttcaaaatactctttgtagaagcctccgactttgtttgtattgtctacaacaaaaatgaattcttctgtttcatttttgacttcatactctttacccggcgtcagcacatttttgacaatgtattttttcgcatctgtatgtacgcatttgacctttttgacgctttcttttgtctgccaattattatgaatcatttataaaactccttttcttaatcgataagcttattgtagccgttttttcttgtgaattgcaataacggttatcgattgattttaccggaggtgttattatagaatgactgtatgcgcttactttgcgcggacatcaagatgctcaaaacagaccataaaaaaatttcgggaggtttgttacgaatgagttctttaacgatgcagatcacaaaaaggctggaaacatttttacagggcacgaagaaactttatattgacggaaaatttgttccgagcgcttcaggatcaacatttgtcacaccgaatccggcaaccggagaaacgctgatgacgctttacgaggcacagtcagaagacattgacagtgcagtgaaagcggcacgcaaagcctttgatcacggcgaatggcgcactatgccggccgcttccagaagcaggctgatgtataaacttgccgatttaatggaagagcacaaaacggaactcgcgcagcttgaaacacttgataacggaaaaccgattaatgaaacgacaaatggggatatcccgctcgcaattgagcatatgcgttattatgccggatggtctacaaagataaccggacaaacgattccggtcgccggctcatattttaattacacccgccatgagcctgtcggcgtcgtggggcagatcatcccttggaacttcccgctccttatggcgatgtggaaaatgggcgccgcccttgctacaggctgcacaatcgttttgaaaccggcggaacagacaccgctgaccgccctctatttagcggagttaatagatcaggcgggcttccctgacggcgtcatcaatattgtcccagggttcggcgagacggccggggaagcgctgaccaaccatgacgatgtcgataaactcgcttttaccggttctacagaaatcggcaaaaaaatcatggaaaaagccgcaaaaaaaattaaacgcgtgacactggagcttggcggaaagtcacctaacatcattttgcctgacgccaatttgaagaaagcgattcccggcgctttaaacggggtcatgtttaatcaggggcaggtatgctgcgcaggctcccgtgtcttcattcacaaagacaaatatgatgaggtcgtcagcgaaatggtttcatatgcgaaatcgcttcagcaaggcgccggccttcaccaagatacacaaatcggcccgctcgtcagtcaggaacagcatgagcgcgtgctttcatatattgaaaaaggaaaagcggaaggagccaaagctgtcgcgggcggcagctgcccgtttgaagaagggtattttgtctccccgactgtatttgcggatgtggatgacagcatgaccatcgcaaaagaagaaattttcggccctgttttagccgccattccgtatgatacggtagatgaagtcattgagcgggcgaaccgctcggaatacggccttgcagccggactttggactgagaatgtgaaaaacgcccattacattgctgaccgtctccaagccggcaccgtttgggtcaactgctacaatgttttcgatgcggcatctcctttcggcggctataagcaatccggcctcgggcgggaaatgggctcttacgcgctgaataattatacagaagtgaaaagcgtctggatcaatctggaagattaaatcaaacaagaaactgctgcctgtcagcagtttctttcttttgtcatgccgacttttacatatgaatatatatgcttctgaaggagttgagcgagtgtgagcacaattcatgaaaacgtcaaaagccgccaaaagaaaaccatctctctattaagagaaacgcaaaatgcgaacggctcatggtcattttgttttgaaggaccgattttgacaaacgcctttctgatcctcctcctcacttctcttggagacaatgataaagaactgatcgctgagcttgcagaaggcattcgcgctaaacagcgcccggacggaacttttgccaactatcctgatgaccggaaaggaaatgtgaccgccactgtacagggctatgccggcttgctggcttccggtttatatagccgttctgaggcgcatatgattcaggccgaacgctttatcatctcaaatggcggcttgcgcaacgtacacttcatgacaaagtggatgcttgcggcaaacggcctttatccatggcccgcgctgcatctgccattatctttcttagtcattcccccatccttcccgctgcatttttaccagttcagtacatacgcccgtattcattttgtaccgatggccgtgacgcttaacaaaagattttcgctgaaaaatcccaacgttccgtctctcgcgcatttagatcggcatatgactaaaaatccgtttacatggcttcgttccgatcaggatgagaacagagacctctcttctcttttcgcgcactggaagcggcttttgcagattcctgccgcttttcaccagctcggtctgcgtacggccaaaacgtatatgcttgaccggattgaagaagacggcacattatacagctatgcgagcgccactatttttatggtgtacggcctgctcgctctaggtgtatcgcgccactcccccgttatcagaaaagcacttgccggcacgaaagctttgctcacgtcttgcggcgatataccgtacctggaaaattcaacgtcgaccgtttgggatacggcgcttctcaactatgcgcttatgaaaagcggcatctcagataacgatcagatgataaccagcgccgcccggtttctgcgtgaacggcagcagacgaaagtcgctgattgggccgttcacaacccgcatgctgaaccgggaggatggggtttttcaaacatcaatacaaataatcccgattgtgatgacacagccgcagtgctcaaagccattccgcgaaaactttatcccgcctcatgggaacgcggactgagctggcttttgtccatgcaaaacagtgacggcggcttctctgcttttgagaaaaatgtcaatcatccgctggtccgcctgctgccgctggaatcggctgaggaagctgccatcgatccctcaacaagcgacttaaccggacgggtgctgcactgtttaggagaagcggggctttcttctgatcaccctcagattgaaaaggccgtccaatggctgatccgccatcaagaagaggacggatcgtggtacggcagatggggtgtctgctatatttacggcacatgggcagcgctgacaggaatgaaggcttgcggcgtgagccaaaaccacccggccgtgaaaaaagcgatccgctggctgaagtccattcaaaacgaggacggaagctggggggaatcctgtaaaagcgcagaagagaaaacctatgttccgctttcttacgggacgcttgtccagacggcttgggcggccgaagctttgctgcaatacgaaaaaactcatcatcaagccgtcacaaaaggcatatcttttcttattgaaaacaggcattacgaaggcgccgctttcagctatccgaccggaatcggcctgccgaaacagttttacatcaggtatcacagctacccgtatgtgttttctttgcttgcgctcagcacttttatgaaaatgagtgaaaaggaggaagaaaaatgaaacggcacgcttatcaaaccgagatgctgaattggtgtgaaaccttgaaggaacaagttattcagcaaggtcggttcgatcgcttcgcggcacaaatcgaccggatttttcacacccttcaggatgatggattaacggaggcggaatggtacgaacaggcatcggcactttaccgggacattactgaacccgaagagcccgatgagcgcagagcttatgtgccgatcggcaagcatgtcctccctaaactgccttacagttattccgcattggaaccgtatatttcaagagagattatgaaacttcaccataccaaacaccatcagagctatgttgacggtctgaataaagcagaactggagctcaaaaaagcgagacagacgaaacagtacgacttagtggcgcattgggagcggcaattggcgtttcacggcgcgggccattatttgcacagtattttctggttttcgatgaatccaaacggaaaaagacggccgacgggggcgctctttcaaatgattgatgtgtcattcggaagctactccgcttttaaagagcaattttctcaagcggcgaaaaaagtcgaaggagtcggctgggctatcctagtctgggcgccgcgcgccgggcggctggagattttggccgctgagaagcatcagctctacagccagtgggacgtcattcctttgcttccgctggatgtgtgggaacacgcttattacttacaatataaaaacgaccgagcggcttacgtggatcaatggtggaatgtcgttgattggcgggaggcggagaaacggttcgagcaagcgcaccgcgtgatatggccgctttattaaaaaagcccccgtcttgaacgggggcctgcttcttttggtttaaaaaataccaaggacgtgcagaaaaacgataataatggctacaggagccacataacggattaataggagccagactgcaaaccattttcgttttataccggaaccgcttttcagttcgtcaaacagcatctgtttcgggattttcaacggtacgaaaacggcaattaaaagcgcgcccagcggcattaagacattgctgaccagaaaatccgcagcgtcaaaaatactgcggtgaaaaatagaaacatcactcaaaattccgtacgacagcgccgaagggaccccgacaataaatatagcaagtcccccgatccatgcataacgcttccgttttgccgaatcgccttttgacaaaacagcaactaaaatttcaagcattgaaaaagccgatgtcagcgtcgcaaataaaaacagcagcaaaaaggcgagcaaaaacacgatgcccaacggcatttggttaaagacggtcggcagcacgttaaataaaagctgcgggccttgatccggcttgaggccgaatgcaaacaccgccggaaaaattgccactcccgccatcacagcaacaagtacatttaataccgtcaccgatacggcggattgaacaatattttcttctttttctaaatatgcgctgtatgtaaccattacggacactccgacgcttaacgagaaaaatgattgtcccatcgcatataaaatggtattggcatccatcgcgccaaaatcaggcataaaaaagaattttaatccttttgctgcatcatgcagcgtaacggagcggatcattaagagaataaacagaataaacagagccggcatcaacacctggctcactttttcaatgccgctgctcaccccttttgccacaactaaaatcgtcagcacgataaacagcagctgaccgaaaacggctgcataaggatttgaaatggtatcgataaataacgtatcaaatcccgaagaaagcgataagccgcccgtaaagccttttataatgtagattaatatccatccccccactacgctgtagaaggataatagaataaaacacgtaataattccgagatatccgatccagtgccactttttccccggcgcgagcgccttataggattcaacggcgtttttttgtgtttttctgccgataataaattcagcaagcaaaagcggcagtccgattaaaacagtaaataaaataaaaacaagcagaaaagcgccgcctccgctggttcccgctacgtaagggaacttccatattgcgccgagcccgattgcagagccggccgtagctaaaataaatcccagcttagatgaccattgattagcttctttcacttcagcactcccaattcatttcagtataaaaatcaattgtaagaatatatgtctgaatagtcaagaagatgttagtttacataataattttattgaaaacttatatttaatattgaattattcagaaaattatttataatggaatacagaaaagtcagtcatattttctgactgattgaatgtaaaaggagctgtgtttatggaatggctgaaaaaaataagcgggtttgcgggccaaacctttggcttgtgggttatcgtctttgccggtttaggattcgcctgccctgatttgttttcttggatcagttcttatatgacgattttccttggtattattatgtttgggatggggcttactcttcaagcaaacgattttaaagaattaatcagaaagccttggcatgtcgtgatcggagtcgctgcccagtttacgattatgccgcttacggctttctgtttatcaatcgggctccgcctccccgcagaaatcgccgcgggcgtcattctggtcggatgctgtccgggcggtacggcatcaaacgtcatgacgtttttggcgaaaggcaatacggcgctttctgttgcggtcaccacgatctcaacattgcttgctcctattgtaacgccggcacttattatgctgtttgcgaaagagtggctccccgtttctttcggctcactgtttgtttccattatgcaagccgtgcttttgccgatcgtcctcggggtgattgtgaagctgttcttcaaaaaacaggtcggacaagccgtgcacgcgcttcctctcgtgtcggtaatcggcatcgtagcgattgtatcctctgtcgtcagcgtaaatcgtgagcatttgcttcaatcaggactgctgattgtgtctgtcgtcatcttacataacggaatcggatatttgttaggattcctgactgcaaagctgttcaaaatggattatgcttcacaaaaagcgattgcgatcgaagtcgggatgcaaaactccggactgggcgcagcgcttgcgacagcgcatttctcccctttgtcagccgtgccgagcgcaattttcagcatatggcacaatctgtcggggtctgttcttgccacctactggtctaagaaaaaagagaaaaacagcgccgaagaagaagaagaaacggcaaagattccgttttcataactgaacaaggataggataggctgctgccgctcctatccttgtttattctgcagatcacgaaacagacgcaaaagcgctttttttacatccccctgaaataaacctccatgataacaaatcaattggcggatatcgtaatcgagcagccgctgcacagaacggaccgcatcatccatatgtaacgtatagccgggattagcaaggtttagctttccgtcttcaatgacgaccgcatcacctgtgaccatagttttttcggcaggcagataaagactgatatggccgggtgtatgacccggcgtggctacaacgcgaatgcctccgcaccaaggcagcagctcgccgtcagtaactgtccggtgaactggagccgattcgactgattgaagcgagcggatgaactgttttgcatatggttttgcatcctctggcaatgaacaaaacgttgattcagcctgctcaagccgtaaagattttttagagccgtcaatatacggcgcttcacgctcatgtactgtcacgctgacatccgggtgcaaacggtgtaatgcagcgagtgaaccgatatggtctatgtcgtgatgcgttacaatgatttttgtcaatgaatgaagcgacattccatgccgggcagcagcatgttgaagatggtttgtagaaccgggatatccgcagtctattaatatcgtgtcatgttcgtcttgcagaagtaccggagtgatagaatgcaattcttcattatattcaaattcgatctcaagcggatgacagcttttcatataaattctccccttctctcaataaaaaaagtacactgcttgtaagggcagtgtactttttgtctgtctcaaattatccttccagcaacagctgttccggatcttcaagcaggtttttaatggtgacaaggaatccgaccgcttctttaccatctacaattctgtgatcgtatgataaagcgatgtacatcatcggacggttttcagagcgctccgcatcaatcgctactgggcgcagctgaattttgtgcatacctaagatcccaacctgagggctgtttaggatcggtgttgacataagcgatccgaatgtacctccgtttgtgatcgtgaaggagcctccttgcagctcacctaatgttaatttattgtttcgcgctttcttcgcaagttcgccgatctctctttcaatgccggcaaacgtcaggcggtcagcgtcacgcacgactgggacgacaagcccttcttcagccgcgacagcaataccgatgtcatagaattttttcacgatcagctcatcgccttgaatttcagcgttaaggagcgggaattttttcaaggcagccacgacggcttttgtaaagaacgacatgaaaccgagttttacttcgttttgctcaaggaattggtctttacggcgttttcttagattcataacggccgtcatatcaacttcgttaaatgtagtcagcatcgcagaagtctgctgcacttcaaccaatcgtttcgcgatcgtctgtctgcggcgggacattttttgcacttcgacaggtttgtcaaagctttgctgtgtttttggagcctgctgtttcggctgtgccgcaggttttgaagccggtttttcataagcttccacatcttgtttgcgcacgcggccgagcgggtctcccgtcggaatttgtgatagatcaattcctttttcccttgccagcttgcgtgcagccggagacgctaccgttctggatttcgcttctgattgtgcttcctggctgacttcttgtgcagcaggttcagcttttgcttcctctttcgtttgttcattggctggagcactttctgaaggggcgggtgcagaactatcgccagcgccttctgtaatggtaccgataatttctcctacttggacggtatcacccgaatctttcaatacctcttttagaacacccgattcttctgctgtcaattcaacatttactttatccgtctccagttcaagcaagtactcaccctgttctacataatcaccgggctgctttaaccattgggctatcgttccttctgagattgattctgctaattcaggtaccttaatttccgccattttttcatttcccccttagtttttgcgagtcaagctatcagatacaatgcgttcctgttcttttttgtggactgtcggatctccttctgcgggactggatcgtcttcttcggccgatgtattggacatttactccttttggcgcgatttccgtcagatacgggctgatataactccatgcccccatgttctgcggctcttcctgaacccaaacgatctcttgcaggttcggcagtttggcgaaaagctccttcgtatcttttgccgggaacggatacagctgttcgattctggcaatatgaagccaatccttatcgccttccattttgttgaagtgatcgctgatatcaattgacacttttccgcttgataatacgacgcgagtcactttttcgtaagcatgggaaagaccggactgctcatagacaggcttgaatcggctttcgctcagttcctgcacttcagataccgtattcgggttgcgcagcaggctcttcggcgtcatgatcacaagcgggcggatttcctcacgaagcagcattttcgcttgtcttcttaaaatgtggaaatactgagccgcacttgtcaggttggccaccgtccagttgttttccgccgccagctgcaggaaccgctcgacgcggccgctggagtgttcagggccctgcccttcgtaaccgtgaggcagcagcatgaccagtcctgatttttgtccccattttgcccgtcctgcagatatgaattgatcaaaatagacttgagccgcattagcaaagtccccgtactgcgcctcccacatcacaagcgtttcaggcgaatacacgttgtatccatattcaaagccgagaaccgatccttcagagagcgggctgttatgcaccgtaaatgaagcagcgcagtcgtctaagtgatggagggcaacaaattcttctcctgtttcgctgtcatgcagcacaaggtttctttgagcgaacgttccgcgttctgaatcctgtccggtcagccggatcggcgtgccgtctttcaaaatggaagcaaacgcaagcgattcagccaatgaccattcaactttacggtcatcatcaaacgcttttgcacgtctttccaggattcttttcagcttgccgaacacgttaaaagattccggccagttgataagttcgccgttcagcttgcggagaacatcaaaatcaatggctgtgtcaacgtctggaaaaccgttggacaccggttccggcaattcaatttcccgtacggcgtcttcttttttggcgggcacctttttataggcgtcttcaattcgttttgtcactgccgtttcgatgttttgcgctttttcctcgctgatcagtccttcacttacgagtttttccgcaaagatccgcttgacagtcgggtgttttctgacggcttcatacagcatcggctgtgtcgttgacggctcatccatttcattgtggccgtaccgtctgtacccgattaaatcgattaagaaatctttattgaaccgcttccggtattcaaccgcaaatttaacggctgacaggcatgcttccggatcatccgcgttgacgtgaacgatcggaatttcatagcccttcgccaaatcactggcatatttcgtggatcgtgattcatcgctttcagttgtaaagccgatcatattattggcgatgatatgaatggccccgccgacctgatagcctttcagagagcttaagttcagcgtctcggcgacaatgccttctcccggaaacgctgcgtcaccgtgaattaaaatggcgagcgattttgtttcgtcttgaaccgggtaccccttttgcgttcttgtttcctgtgccgcccgcgtgcttccttcaacaatcggattgatgaattccaaatggctcgggttgtttgcaagcgtaatccgcgcgcttttggtttcagcatcctgaagctgtctgtctgcaccgaggtggtattttacatcgcccgtccagccgtagctgatgccggtcgatccttcagacggcacaaggtctttattcggcgcgtgctggaattctgagaaaataatctcatacggtttgccgagcacatgcgcaagcacatttaaacggcctctatgcgccattccgatattgacattggttgtgcccgctttcacagactgggcgataatgtcgtcaagaaccggcacaagcgcgtctaatccctcaattgaaaaacgcttctgaccgacgaatgtccggtgtaaaaattgttcaaatccttctacttccgtcagtctttctaaaacggctgacagtttttccggtgaatttttccggaacagttctccggattcgaccatttttgtaatccatgcgcgctcttcgaaatcatgcacatggtcaaactcgaaggagatggttcttttataggtattgcgtaaatgctggatggcttctaagccgtttgttatattggcaggtgcgtctttacagatgacagacgcgggtattgctttcatttcttcttctgtaagcccgtactcggataacggaaagagctcgctctttttcggatcctttctgagcggattgacggaagcgttcagatggccataggttcgaatatcttctgcaagtttaactgctgctgcgatcttttgaatcagatctgcggtgacgcgtccctgttcctttgtacccgatgcctcttttatttggcttggcggagcgccgagttcgtcaaacatgtctttcagatccggatcaatgctgtctggatcttcagcatattggtcgtacagctccagtgcgtagccgaggttcggtccgtaaaaatcttcccaattcattctttgtttcatattattttgaaacatttgaatattacccccaacctagataatcaagtgatcaattcactatcttgaaataacttttgaacgctgtgcccaaaattatgtaataaaaacgcttccaaggatattttaccactgattgcgtttggattctaccttgattgttcacaaaatagtaaaaaaaacagatcaataccgaaaaaattaaatcattttaaaataaaaagcgaaaaagcataggaaaaagcctatcctatgcttttatgaagcagttttttcaagagcggatacagcacatcgggcagctgatcgacatccggaacaaaaatactgtactttccgtacatatcctgaatggttttcatctgtgattcctctattgcagtattggacagaaaaacatttatgacttctatccctttttttctcgcttcgatgacagcctcgctcgtatcgacgatgccgttttgttcgtatccgaatgctgccggctctccgtctgaaaacacgattaaaaatttttgcgcctcactccgccgcatcagctgtttcgtcatttgtctgatggcgtatccgtctctgttatcttcttcaggcgcaagctgcatgatcagcggacccgccgcctgcagcagcgactcttcaaacggaatgacggtattgaagaaattcggctggctcgtttcggtcgcttcgttcgtatcctcccaaaatccgacgatctggtgcggtacggacactgatttcaaggcttcatgaaaaagaacgatccctctttttgtttcatccattttgtcgaacatgctggccgaacaatcgacaagcaatgtaaaaacggcgtcaatgtctgaagacgggtcctgctttttaaagaaaaggcgcgggttccgctccgtaaaatagcggatcagtttgcgattcagccggcctgcgtgaaggtcggtccgcgggagcgtctttttgtgctcaagtgttttttgtatcatctgcttcaggcgtttttgatatgattctatcgtttttgcctgttctttataagactgctcctcttcaggagacgctttatgaggcgtttgataaaccgggaaggcaaatttgttttcttttccgtcagccagccccgcgccctcatgttcatcctgaatggattcaagcgcttccagtttggagtaatcctctcttttcgtctgacgtgcggaaccttgaacggagccgagcgcctggtcaccgtcatcgccttctctggccgcgtctttcccaagatctgatttcgcgccgtgctcaatatcaaattgaaggaaactttttgacggcgcttcggtttcccggtgccacgtattcattttctcttcaaggatttcttcatctccgtcggaagactcagggagcgtgagatcgtcacttaacgaaggcgctttttttacactttcgaataaaggctcttcagccgctttttcgtaatcaagttccggcagaaaaaagtacgtgttcagcatatctttctcaagcacttcatcaaggccttccatgaggtcttccgttatttttgcgatttgttccgtagaatccgcctcatacacccggatgagctgacgttcaatatacggtatcatcatatcaatatgttcatgcatggaaggaatgccttcaagcggagactcagccgtcagcttgacaaacatcgcgcaatacaaagcgtcggtgaaaatgctccgttctaaattcaatgtcagctgcgtcgtgaaatatttcctgtacatctccctccgcttctgaaaaacacgtttcgttcccggccgttcttttttgatcagctcttcaattctgatatcctcaagcagcataaacagctgcttggcaaagctttggcgggtgaaatgccggtgaacgtcatttaaaaaccccgcaaattcccgaaatgagctgctgcgtgttccgacagcgcgcaaatagacatcgcttttcaggccggcttccatatccccggctgatcggtctttccaaaagtggctcatgtaaattttcttttcaaagggattgtagtaagactgcacgccgtattccacttcaacttcactgcttctggtcagtgttttggccagatcagtcagcatcatgaacaaaaacgaatcaatcgtgctgtcattaaatttgataaacttcattgtatatccctcattcgaacagcgtttctgcaatatttctgacagcggctttttccctgtcgtcgtcaagtttttctacgatgcctctttcaatcgcccgtttcggcgggatgtacgcagccaagtcgcacgtatcaatgagagccctgatggacgccgcttcttctgacacttgtccgttatgcgcttgtgcgattaaatcagaagacagcgtcataaagcgctcaattaatttctcatcttttaagacagactgagaggtcagcacctgcttcaggaggcttcctttaatatacggaacatcaatgatgacaaaacggtttttaagggcttcgttcagcggaacggtgccgacgtagccttcattaatcgcggcgataacaccgaatccttcgcttgccttaatcacttctcctgtaaagggatttgtcatcatttttctgtaatctagcacgccgtttagaatcggaagggtttcaggctttgccatattgatttcgtcaatgtataaaaaatgtccctcgttcattgcggttgttacaggtccgggaacgaattcaattgtcgcctgtccctgttcattttcaatcgttttatagccgacaagcgcttctgcatcgaggtctacggagcagttgacgctgtgcatcggtttatgaaaatagttcgaaagcgtttccgccaattttgttttccctgaacccgtcggtccttttaataagatattttttcccattgtcaaagcaatgacggcatcgaatacaatcgctttatcttcggcctcatagcctgatgatccgattaaatcccggaattcttgggaaacgggatgattttgataagcctgcagtttgttttgtatatcttccggaagtgataggtgctgtaattctgaagtcataggtgatgtttcctttccatttgtattccataaccgagtatactaaaaaagcccttgtatactcaatacaaaagggctcattccctgcgggcgctttttgtcaggggagcgcaggcgattctggctccggaatttccgctcgggtttgtcaaataatcgtccgtatgttcatgaatgacgaacgcgcttccgtcccggtcgagcaggctgagtctgctcccttcttttaatgaagtttgcggcgcgttcataatgacatccactttaccatcagcccccacttcaagattggggagatccccggcgtgatgacccatcggattgttgaagccgtgttctttgttcaaagggttgaacggaccgccggctgattcgaaatcaggtgcctgacatgtccctttttcataaatatgaaacccgagagaagtgccgggcggcagatgccccgctgatatatgaatgtctgacccttcatcatcagattccctcacttcgatatatccgatcgtttttccgttttgattgatgagtccggcatgctcacggtatgcagatgcttccaatgcgcggctttccccatgttttttgggcggaacaggagcgggtctccccccgcagccgcaaagcgtaattgatgcgagcatgagaaaaagcaagagacgattcatgcttcctcccccttatttttttacccatcagtcttgtcaaaacgtgaaaatggtaaacaaaaaaagccccgaaaggctttttttaaaaataactgcgcgctcctaaataagcttttttccaatacggattgcttaagtttgaaacttcaaccccggaggagcttgcgtgaataaaatctcctccgcctaaatacatccccatatgagaagggcccgctttatatgtcgtaaaaaagacaaagtcgcctgctgacggctggctgatatgtttcatcgtattccaatatccggctgtgctcagacgggaaacagagcttaccttatttaaaaggtaatagatgtaaccgctgcaatcgaagcccgcaggcgtattgcctccccagcggtaaggcacgccgacatgttttttcgcctcgcctatcattctgtcaatctttgaccctgtcaccggaggttcgggagtattcggcttgtttggttttgccggtttgttatccggctgccgcacaggatcttctgtttttcccgttccgttaatcaccagaacttgtccgatttgaagcacatcagttgtcaatttatttttttctctgatgaactgagcggtgatgccgaaccgattagcaattttccagagggaatcgcctgcttttactttgtaagtggatggcttctcagaagggtttgaatgagatggcggtgttgtgccgctgtttccgttatgtgaagaacctttgatctttaacacttgattcggatacagcatgtctgatgttaattgattcagctttttcagttcggcgatggtgatcccggtttgattggcgattttccacagcgagtcacccggcttcacagtgtaagtccctgatgcgcctttatcaggctttgtctgtctgccgcctccgtccgtgccgccggcagaccctttaattttcagtttctggccaggatagatgacatctgaactcaaacggttcaggcttctcagctcagaaacgctcattttgtatttttttgcgatcacccataacgagtctccgtatgtaactgtgtaggcacccgtgcttcgttttcccttttgccccgttttatgtgtgccgctgccgtcgggaatgtgcagccgctgtcctgggtggagtatcgttgatttcagtttattttccgcctgcagggctgaaatacttgtatgatattgccgggaaagcttccaaagagagtcgccgctttttacttgaatggtttttgcttcagcgggatgcacggcgaaggttgaagtcattactgcagatacagccagtccggctgcgatttttttcttcatataacgaaaaacctcctatttatcattgctgaaagggacgttccttttctttggacgccgcctgttatgcaggattcattcagaagtcgacattaattccgattcatttggccttagatcatcaccaatgccacacattttacataaattgagaacatttcacaaaagactttggaatcattttcataacatggcttttttccgcgacattccacctttcttgtctgtttttcatacaattctctttacggcgtgaaaaatcctcccgaaaaacaatcaaaaaaagcccgcttcctttaaaggaagcgggtgagggctgattacagaacccgggtctcggcagttttcacgtcttctgctatcaattccgctgcacgctgtgctccgccggccgctttcagggattctccgatttcagaagcttttgtctgatattcaggattttcgctcaattcttttattgcttcagtaagcagttccgctgttacatcttcttttttaaacattttgcccgcgcccgtcttttccacttggcttccgacggcgaactgatctgcgcccatcggaatgacgatcatcggggttttgtagtaaagcccttcgctcgtactgttcattccgccgtgagtgataaataagtccgctctcttcaggatctcaagctgcggaacataaggcttgacaatgacattctcaggaatttcatcaagctccgccggatcaagatgtttgccgattgacatgacggcttttccgttaaagtttctgaccgcttttaagcatttattaaacaattccttctgattgttaaaaatcgtacccatggaaataaacaggactttttctccttcaagctgttcaaacgggaaatcttgagccgccgccctttcggttatggacggaccgacaaagagataagaatcgccaaactcttcttctttcggctgaaacgctcttgaagtaaatacgatggtttttctgccgtcatttgagaaaatatcatacggcgttttaatgtctgcgctgaattcttcattgagccggctgaccgcttcggtataagccggataatgagatgattcctctgatacaaggtttgtatttgaaaacacttctttaataaatgcctcattcattgcaaatgtcgtacaaagtgaatatgccggcagtttcagctggtttctcacgagccttcctgccagaaaatgatgatcatacaggatgtagtcgtaggattcatcttttacttcctcaagaatacggagtgcggcttttttggaagtctcaatcattaatagcaaaaactcggtagcgtcccgctgttcatcacccgttgcgttttttccgaattcatctttacggaaatcttcatattcacggaattccgctccgcttgacgcgattttgttctcatattccttcacgccgtaatatacgacatgttccccttttgccttcagttcttttacgacgcctaaagacggattgatatgcccttctcccggaaagccgatcatcaatacatttgccatctttccactccctattcttttaaattttatgtatatttaaacgataacatcaatacagaaaaaggtaaagatgttcaccttattaatattaaatgggtacaatattcccattttcttattatttcgtatgaggcgcccgcggcgaaacaagcggatacagtccgccgtctttagcaaaggacatttttcccgtttcttctgaaacaacgagcacgagtgcatcagtcacggccgaaagtcccatcgcggccctgtggcgcgtcccgtatttgagatcgacatgttttgttgtgagcggaagcacattggctgctgatacaacccggttttctctgaccaatacggctccgtcgtgaagcggattgccgggataaaaaatactctcaattaaagctgcactgatctcggcatgcaggctggtccctttttgtatcattccgtccagcggatctgcacgttcaatcacaatcagcgctccgtgtttttcttccgccagatgctgcacggccctcgccagctctgtataggaaggcgtaaaatgttcgatatatgactgcaggtaaaacgacgaagcgacagcctgcatttcctgaaacgtatgtcccagttcatctaattcgcaaagaaggcattggtctttttcattcaatgtccgcagtatcattccggcatcctctgtaatttgtttcaaatacgtttgaacggcagcggtaaacgcgctttccgtcatttgagtgtggcgcatgtcacatcagctcctttcccttattttctgcatcgcgcgcatggatatgcgccgctgtgtgcaccataatcatgaaaggaggcgcacatcatatggaattcgcacggctgatgcaatatatctgcacctttttaggggtcatttcactttcattcatttatgccaagatgtttaaaaagccgaaaccggacaaaaaagagtaggccggctttcattgctttttatacataaaatgttataatttctctcgttaaaataaagaaacggggaacctaacttgagagaaacgaacacgatcggccaaaaggtcagacagctgttacatatcttcattccgattttaatcacacaggcgggcctttccctgatcacctttttggatacggtgatgtcagggaaagtgagcgctgccgatttagccggggttgcaattggttcaagcctgtggacgccggtttatacgggcctggcaggaatattaatggccgttacgcccgttgtttcacagctgtttggagccggcagacaaaaggaagtgccgttttccgtcatccaggccgtttatgtagcggccgttctcagtgcggcggttatcctgatcggctttttcaccgttgatatgatcttgggacatttgggcctggaacctcgtgtccggacgatcgccaaacactttttaggatttttatccctcggtatttttcctttgtttgtgtacaccgttttgcgctcgtttattgatgcactcggcaaaacgcgagtcactatgcttattacgctttgctcattgcctattaattttgttttaaattatgtatttattttcgggaaattcaacatgccggcattgggaggagtcggggcggggctcgcttccgccctgacttactggtgtatttgcgccatcagcttttttatcgtctgcagatttgagccgtttgccgggtactctgtatttcggaaactgtaccgtttttctccgtctgaatgcagaaagcttttgaaaatcggattgcctatcggttttgcggtattttttgaaacgagcatttttgcggctgtcacactgcttatgagccattttcagacggtgacgattgcagcccaccaagcggcaatgaattttgcttccctcttgtatatgctgccgctcagcgtatccatggccatgaccattttggtcggctttgaagcaggcgcaaatcgctatagagatgcccgctcatacagctatatcgggatcgtgatggcgcttagtttttctttatgcacggcggctttcattttgctgttcagaccgcaaatcgccggaatgtatacatccgatccggctgtgctcatgttgacacagcactttttaatctatgcgctgtttttccagctttctgatgccgtagcagctccgatacaaggcgctctgagaggatataaggatgtcaactatacactcggcgcggcttttgtgtcgtattggattatcgggcttccggtcggttacgcagtcggcacttatacgggcctcggggcatacggctactggatcgggttaattgcaggacttgccgcaggagctgccggtttattcttcagactgatgaaactgcaaaaacattatgtaaaaaaaatgatttcataaaggaggagcagcaatgccaaaacataaactgctgtacgattatttaactgaacgggcggaggacatcagtcagacatggtttgatacccttcatgatacggatcctgattctgtttatgcttctactgacccggctgtactcacgaatctgaaaaaacaaaatctggcgtttaattatcagctcaatcggattttttctgaagagaaggaagtatatacagcggcattggaaaagtgggcgttcgaagccgcacgggatgaagaacatttaaaaactcccatccattatattattcgcgagtttatcagagttcgtgatttgtatgtcggccatgtcaagcagtttaccagacttcattcagacaccgtgacagaagaagatgccgaagatatattccatacgctgattaaatcgtttgatgtggtgattcatattttcatagaagaaatgtataaaaacacaaacattcagcttgaagcgcaaaaagaattgattaccgagctgagctcgccggtaattgtgctttttgacaatgtcggactgctgccgctgatcggggatattgacacggcaagagcaaaaatgatcttggagaatacgctgcaccagtgttcagagaagcgcatcacgcagctgtacattgatttatcaggtgtagccatgattgatacgatggttgcccaacagcttttcaccttaattgaatcactcggaatgctcggcgtgaaagcgacattatccggaatccgtcctgaaatcgcccaaaccgcagtgcagctgggactgagtttttcaaatttatcaataaggtcttcgcttgcagaagcgatcgcttccgatctgacacaaaaaaagggataaggcatttcagccttatccctttttttatcagtctttccacggatatgtccaatacacttcttcttcaaaccatgtctgaagaaccggctcgttattttttattttttcttccagctctctcagcatgccttccgtttgggtgcggtgcgcttttaaggcattcattttaatatcggcaacctctttaatatcaagaatgacatcaggcttgccgacggcttcctccctgttgcgggtgattgccatgcaaagcgtgcgcgggcggtcctcttttttctttctgtaaagcgctctgataaccgcttcgccgcatgcatcatgatccggatggacgccgtgctccgggtagaatgtgacaatcagactcggttttacatcgtcgataatctcttccatcatatccgcgagccactcgtcatcttcaaattcaagtgttttatcacgaagcccgagcattctcaggtcagtaacgtccattgctttgcatgcgtcgatcagctcttgttttcttaacagcggcagtgtttcacggttcgcgaaaaaaggatctcccatgttccggcccatttcgccaagcgttgcgcatgcatacgtaacgggaatatctttttgtctgtgtaaagcaatcagccctgccactccgtatgattcatcatcagggtgaggcaggatgacgagtacatgttctttcatgattttcacccttttctttaaactgtaaacggcttttcgctgatttgaagcgaaatcgccaattttccgcccggcagatgccctgccattaacaagcggtcttcgtcatctactgtatattcagtcagaccttctgcgtaaatccagccttcttccgttttcaaaccgacgcggtacgggccgtttcctttgattttcgcctgatggtacgtcacttttgcattgcgtatataggctacaaccgtcatgtttttctcattcagatgcgctgaataagaaccggtcgttgtttccaaatggatatatacaggacgatcggcatatcgctctaaagaagtttgcacatcttcttttatgatcgctttcatagctgctcccctctttcttcttttaaaaattgcaaacgcttcgtatgtagttcaaccaattcatatttctcaatcggccgcagccgggaatctacaattcgctgcaccgccagagcaaacttttcctcgggtgacttccggagcctcggatgtgttctttgatcaagcagttcaagatcaattgccttctccgcttcttcaagagttgaagccgggagagtgcggttattccacagtgcctgataggcttttgctatgtctttatcagtgcccattgtacagctcctttacatactcgtaatgattatacataatttaagctatcgctggaaagcgaaaggcttagcggctttttatcggccgcttccattttatctgtgaaaaggtaaacaaaagcaatgctgcccatatacaaatgaaggtaaacgctttttgcccggaaaacggttcatgatacacaaatacgccgagcataagggtaatggtcggcgctatatattgcaaaatgccgacttgatacagcggcagacgctttgccccctctgcaaacagcaacagcggcagggccgtaaatacgcctgcgaaaaataggagcgcccatgttcctgcccccaaggacccggaagtgctcccgtcagctgtatatcctaaataaataagtgcagccggggtaatcaaaagcgtctccagcgtcagtccgatcgtgctggacatgcgggttctttttttacataagccgtacagaccaaagctgaatgcaagcagcaatgcgatataaggaaccgcgccatattgaaacgcagatatgatcacggccgccccggcaatagaaacggctgctgtttgcatcttgttaagcttttcttttaagaataggatgcccaaaagaacggaaacgagcggattaatgtagtacccgagacttgcttcaagcaaaaagccgtgattgacggcccatatgtacacaaaccaattaacggaaattaaaacggaagcgaaaaaaagcgccagcaggcccccttccgatttcaaaagacgcagttcacgccatccggttttccacttcttaagcacagttaaaagcacacacatgaaaacaaatgaccataaaatccggtgagctaaaatgtccaatgcgggtatttgttcaagaagtttccagtagaccggaaacagcccccacatggcgaaagaacaagcggtataaatgattccttttcttgcgttattcccttgcacggccttccccttcctttctgtaaacagattatattatatcacgggaagcttccggcgggcatatactatgttgtccgttaagaaagggtgagatgccgtgtttgattggaacaaatattttcccttccaaaatcagttctctaaagaaacgtttaaaaatgctgatccgaaagatgtcgagacatatgtcaaccgagtgatggaaagcgtattcggcgccggttatgccggacagttcccttttcgcgatcccatgtccaaaaatgccgagtcggtcgaagcggaaccgcccaagccggaaattgacctgtttgaaacatccgatcatgtttttgcgaaaattcccgccgaacaagaggaactcgaccgtatcaggattaagcatacgtcacacagcctcgttgtagagaacagcagtctgggagaaggaaaaaaagaaatcgtccttccgagcctcgtcaaacggaaaggaacaaaagcagtctataaagacgggatgattgaagttatgttttcaaaacaggaagactacaatctatcggaagtggagattttaagataaaaaaacggcccgcgcgatgcaggccgttttttctttaataaaatggcggataaccgccggctcccggcccaaaaccgccgtatgggacgcctccgtatccgtaaccggcgaacccgtacggatagcggggtcttgtgaaacctgtggcaatcacgcctccgagaagaccgcctaaaaatccgccgaataaaggagcgccgaacaaaaaaggacttctcgccggaaatccggcaggaccgaaattcccgcgatacaatgcatgacgagggtacatgtttttcctcctttatgtctgcctattcttaagcgtattcataaaatgaggaaattgattgggcgattgtaacaacatgtgcctttctgtgatattgcattaatgtataaatattttggttataatttgattacattttgattaactgttatacttttttacaagttgcgacatgataaaaaaccatcagggggaataaaatatgccattacttcgttttgacgttattgaaggccgggatgacgcagcattaaaaaaattactggataccgcccattacgccatggttaaagcttttgacgtccctgtaacggaccgttatcagatcgttcaccagcatcggcctcatgagcttatcattgaagataccgggctcggtttcaaaagaagcaaagatcttgtcatcatcagcattgtcagcaaagcgcgcaccgaacatcaaaaagaaacgttatatcaactgatggctgatcagcttaaaacagaatgcggcatatcacccgaggacatcatgatttccattacagaaaacgggaacgccgattggagcttcgggcttggtgaggctcagtttttaaccgggaaactgtaaaaggcctccccgcttgttctgaatgattgcaaactgaataaaagagggatgtatgttggttagtgagttatatccttttttgcggatttaaaggattagagacaaatcccgtttataacggcgaatatcaaaaaacattgatatttgcccctgctgcgggtttgaattcggctacagagaggaccatgacgtaagcttagggtttattgtaacgcctgatcatttaattgaagcggcatttcagttataccggaaacagtggattgagggaggaatgaaactattttctccaaatgatgtcccggcggaatgtaaaaatgatcatttccttacattcgatgctttattaaagcaattaaaaggcttgaacctcaatctgaacaattttgatattaatggtttttatgacgggtaaacatgatcattaagaaaaggctgccttgggcagcctttgttattcatcacatgtgtcgttggcagatcccccgggctcgcaaaaactgtctgcccatttttgcatttcctgaaaaacggcttgcagggccatgcctttatcagtcagtttataaatgactttgacaggtgtttcaggcagcacctgacgctcgacaatttcattttgttccagctctttgagccgctccgcgagcattttttggctgattgtcggtatcgtttcggtcatatctttaaatcgtttcggcccgtccatcagtacatggataatgaggccgttccagcgctttcccaaaagagaaaaagcggattccattttaggacacattgtatatcccacgtgagttcatcccttcatctgaattgacaagttttttgtgatccattaaaattagttttcgagttacatttagtaagcttctaacttttctattatgataacacgtttatccgaaggaggaaacatgatgacatccgtattagacgttttaaaagaacgcgcatctgttaaagaatacgataaagacgcggtcattacaaaagaggaattaacagaactccttgaaatcacaacgcaagcgccttccgcctggaaccttcagcattggcattttcaagtctttcacagtgatgaagcaaaagctgccctgcttccggttgcttttaatcaaaaacagattattgattcatcagcagttattgccgtattaggcgacttaaaagcaaatgaaaatggtgaagacgtttatgctgaactggctgagcaaggcaatatcacagaagagattaaacaaacgcttttaggccagattaacggtgcataccaaaatgatcagtttgcccgtgattcagcatttttaaacgcttctttagcagcgatgcagctgatgcttgccgctaaagcaaaaggctacgacacttgcgcgatcggcggattcaataaagagcaattcgttaaggaattcgacgtgagcgagcgtttcgtgcccgtcatgctgatttcaatcggtaaagccgttaaaccggcgcataaaagcaaccggctgcctgtatctaaagtgtcaacttggctgtaagatgaaagaaacccttagtccgcttaagcagactaagggttttttataggaatcgctcactgtaccaggttcgtgcctgctctgcttcctgctgtgtgagctgatgaccgccctcctgccaaacaagagaaacggatgcatgggcatctatcagatactgataaagctcctccgattcttcttttgtacatagaggatcgcgttttcccgcaccgataaacacaggcagcccttccatatcaggcagcttcactccgcgtatcggcaccatcggatgatgcagaaccgctcctttcagtacatctttataatgtaacaaaagacttgctgcaatattggcgccgtttgaatagccggcagcaatcacgttttctctgctgaatccgtacatttgcgccgcttcatcaataaaattctttaattcttccgtccgttcaattaaatctttctcgtcaaatacgccttctttcagccgcttaaaaaaacggggcatgccgttttccgacactgatcctctgacaccgagcagacttgcgttcggatcgataaaacgtccgagcgacagaagatcatgttcatttcctcctgttccgtgcaaaagcagcagaacattttctgacgttccctgttcaaacacatgtttcatcatcattctcctttctccattttgggcagaacagctgtaatctggctgcgatgctcttccagccattccggaagcttcagctctgttccgagattttcaaaggattcatccgtcataaaccccggttcatcggttgccatttcaaataaaatgccgccgctttctctgaaatagattgaagtaaagtaagacctgtcaagaatgtcagatgaagcaagatgagaatcagcaagaatatccttccattccgcctgctctttttcgctagtgcggaaagcgacatgatgaaccgtcccgtaaccgccgatacctgcttctttcggcgcgagatcaacatctataatatgtccgatccgcgcctccgattgcagcctgacaatctgatgttcttctcctgtctttgaataaccgaagcgttctatgagaaatttaatggttgcttcaggacggtacgagtacagaagaacacctctcatgcctgtgatcgcttctttttcagtaatgcccgcaggagtccattcactctgtccgcttctttcatcttccattatggcaagcggcaggtcttctgtatcattaaagagaaggacttgttcagacagcatgatctgttcttttacagacaagccattttcttcaagccggcgcttccaaaacgcgagtgctcctctcggcacggagaaataaattcttccggcctgcccttttcccacggttcccgggcggcttccctgaaaaggaaaaaatgtaatgatcgtgcccggctctccgttttggttgccgaaataaaagtgataagtggccgggtcgtcaaaattaacggtttttttaacgagccgcaaacccagcacttcagtataaaaccgaagattttcagcaggatcttttgcaaatgcggtaacatggtgcaatccttgcgtattcaatgtattcactcctaaatatcttgatttcgagatattaactattttaatttaatatgaatgaagatgcaactaaagtgtttcagttaaaaaagtaatagaattcttttttttctgaaaaatatcttgtgatcttatctgacacctgctatgataaggagcattatcaagtttcaggaggaaagtaaatggtcagaaaagcactaattttcgttctcatcttaatccctttcagccagctggccctgctgtcagtcgctaatcgggttcatccgatcattatcgggctgcctttttttcatttctggctgcttttatggatcgcagtcactccattatgttcgtttcttatttataggctgcagaagaaacaaggaggactggactgatgcccgcaaatataacagcattgatcattacagccgtcatcgttttaaccgttgtctgtatcggctttatagccgggagagacaaatcatcacgcacttctgttgaggaatggtctgtcggcggcagacggttcggggggctcctcgtctggtttttagtcggcgcggatctctatacggcttatacgtttttaggcttaacaagcacagcctacacagggggaagcgttgctttttttgcaatcccgtattctgttttggcgtattttatcgcttatttcttcttgccgaagctgtggaaggtggcaaaaatacacaaattaacgacgcttgccgattatgcccgtgagcgttttgacagtaaacttttggccagtcttgtcgccattgtcggcgttcttatgctcattccttatatttgtctccagctgagcggaattcaagatacgcttcaggtggccggaacgggtgtcattaatgtcaatatggtcgtcatcatctcttttattcttgtagcgctgtatacttttttcagcggaattaaagggccgacgtttacggcgattattaaagacattctcgtgtgggtgattatgctgtttatggtcgtgtcactcccgctgatccattttcacggctggacgccgatgattcacactttggctgaaaaagcgccgcaaatgctgacgatcccggactcggggccgaaaggaattccttggtttatcacagcttccatcgtatctgcgctggcgctctttatgtgggcgcatgcggcaaccggcgtatttacggcaaaaagcgcagatgccgtccgcaaaaacagcatgtttctgccgctttataatattgttttgattcttgttatttttctcggctttatcgcgtttcttgtcctgccggaagataccaatccgcggcttgctttattgaagctgattcaaacgtcttacggcggagtcgcgcagggctttgcttactccacgattgcccttgcgtcattgattccctgctctatcatggccatcggagcatcaaacttatttgcgaataacttatatcgggatttgattcacccgaatgtgtcaccaagcaagctgacgatgatcacccgttcaatggtatttgtcgtcatcggactcgcgcttttattcggcatgctgttcccgactgcgctcgttacccttcagcttctcggtgtttccggcatggttcagatctttccggctatcgccgtcagtctgttttggaagaatcaaacgaaagaagcgacaattatcggtcttctcgtcggtcttatcgtgacattcacggtaaatatcacccaatccgcccacggtatatatgaaggcttttggggtttgaccgctaacatggcagccgttattatccttaacccgttttttgtaaaaaaagcggcttcaaacgccgtcaaagacggtttattcaataaagcgccttctgatcaactgaaccaaaaaggcgcttaacagaaagaagccggcacgtaaatgtgccggttttttacttttttcacttccatttgtaggtagccacagttttagccgggatgacagcttcaaactgccgattttctgaaacgacatggaatttttgatcggcggatgtctggttgattatgactgtcacaatggattgatcaggattaaggaacgatacattcgagactgtgtttttggagccgtaattactttctatccgctttgctccccggtcgataaattttgaaaagttgcctgtcatatgaaagatcgggatattccaatagcggtcagggtttttagcatcctgaataaacagcgtcgggtctggggtgcctatccaatgatgcgtcttgatttgactgtcgagcatcgtcacccacgcattgtagctcgacgcgccgttgcggaaatactgcgcgatccggtccgcccctgccgtcccccagacagaccgctccgttaagtgaatagatttatcaggatatctctttccgatttccgacatgacggaaaggtcaccgtcataatcgtgaaaagcgataccgtctgcggcacggtttccttttttatcatctaaaatcggcggaatatagttccacgccccgctcgcattgtgatcataaatccaaattttcgtgtcaattacatgttgtttcatttctttttttaaggccagtgccagtttgcgctgctgagacggcggcatatacatgctcggatagtcgatttccagcaaaggttcattttgaagggtcatggcataaatcggaattccttgcttttcgtacgcctcaataaatttgcggaagtaaacggccagtgcgccgatatatttatctttcagctttccccgcttgaggttttcattcgttttcatccaagccggcggactccacggtgaggcaatgattttcagttccggatttatcgccagcgcttccttgatggttgctgtaatgtgtaaatcaatatccttttggatcgagaaatgacggagcttaggatctgtttggccttcaggcatatcgtcatacgtataaaattcctgtgccgtaaaatcagatgtcccgatcgttatgcgcataacgtccattccgataccatctttgggatcaacgagttttttcagcacttcctttctttttgcgggtgtcatttttgataaattatggattgtggattcttccagggacgatcctacgcctaacacattttgatagcggcgcgacggatcaatatacacagcggcggagtcagaagccttcttttttgtcaatgtaagcggtgtttgttcgtctaaggcgtatttcacttccagcggcccgtcataccacgtacgggaagccggatctttttcagaactgaaccacacccttactttgtttttgtctgaagccttccgatcagccgcatacacttcggtttccatgctgcttgatatgaaaaagaaaaacataagaaaaaccagcgtcatgtgcagaccttttttaaaaaacatgaaccaccatccctttccttatttttataagcgatctgtaaatgaaaagccggacactcacctccttcccactcgaatgaatacgctttcgaaattactgataaaaagccggcttcacacaacggtgaagccttccctttttacacctttaagatacatatgagccgtttgtttcaatcacttttttataccattcaaatgagtctttcttaagccgcctcattgaaccgttgccttcattatcccgatcaacataaatcatgccgtagcgttttttcatttctccggttgtaaatgacacgatatcaataattccccatggtgtatagcccattacatccacaccatcatatgtgattgcttttttcaaagcatttatatgtgacgataaatattcaattcttgaagtgtcatgaattgaaccgtcctcttctaatgtgtcgatggcgccgaatccgttttccacgataaataatggaatctggtagcggtcgtataagcggtttaatgtgtaccgtaaaccggtcgggtcaatcgcccagccccaatcactcgctgtaatataaggattttccacgccgtttggcaatcctccgtttacgacatctccggtattatcgtttgatacatcactttttacggttgtagacatgtaatagctgaatccgaggtagtccactcggccgtttttcaaaatctcttcatcaccgtcttcaaagtgtatctgatagccttctctttcaaactcttttaacgcatagcttggataatatccgcgaacctgcacgtccgggaagaaaaaacgctgtctcatcgtttcttcagccagcatcacatcgtcggggtgagatgagtacgggtaaatcggaacatgtgataccatcgcgccgatcctgaactcaggattgatgtctcttcccttcgaaacagccaatgcgcttgccagcagttcgtgatggccggcctgatacatgacttcttttgcgttttcgttttctttgacggcgacgcccgagttcgtccataaaaagatcggattattcacatccatcttattattgatttcgttaaacgtcatccaatacttcaccttatgtttatagcgttcaaaacacacttcagcgaattttacaaaaagtccgactgtttttctgtttctgaaaccgccgtattctctcgccaaatgcagcggcatctcaaaatgtgacaacgtgattaccggttcaatcccatgtttcagcaattcatcaaacacccggtcgtaaaaagccaatccttcctcattgggctcggcttcatcacctttaggaaaaattctgctccagccgatggacgttcttaaacatttcaggcccagctcgctgaataatgcgatgtcctctttataacgatgataaaaatcgatcgcttcatgattcggataaaattcccgctcttcaattgtatctgttattttccggggcacaccatgcgcgcctgccgtcatgacgtctactacactcggccccttgccgcctttattccatcccccttcaaattggtgggcggccagagcgcctccccataaaaaatcttttggcaatgtccccatcgtttatatcctcctttatttgactgccgcttgcatgccgaataaatgcactgcagccgcttcaagcatccgcttcgcaagtgcagaagaatgcctgcctttattttcatattatacgtttacattataattgtaccggtataatttatcaatacataaacaattatagttaatttacgaaatggcttttaaaaacgattatgctataattctggaagaagcgggacaataaatgaatgaggaatgtatatgttaaaataccagcaaatcgcgatagatattgaaaaatacatagaagaacatcagctgcagcaaggggataaactgcctgtgctgcaaaccttaatgagccggtttaacgtgagcaaaagcacgatcaccaagtccttagatttattagaaaaaaaggggattgtgtttcaagtgaggggaagcggcatttttgtcagacggaataaaagaaaagggtatatcagtctgctttctaatcagggatttaaagaatcacttgaagattttaatgtcacttccaaattattagcgctggaagtgagaaaacccacgcctgaggctgcccaaaatctgaatatgccgcctgacggcgacgtgtattatgtcaagcgaatccgatatattgatgggctgacattgtgtatcgaagagtcattttacaacaaatcgattattacgtatttgaataaagagatcgtggcagaatcaatatttgattatattagagaaggtctcgggttaaagcgcggtttttcagatttatatctgtacgcggggatgttaaatgaggaagaagcggagtacttaggtctgtttacaggagcgcctaagctttgtgttgaaacgatttttcatttaaccaacggccagccgtttgacttctcaaaagtcacctatcactatgagcaatcacagtttttcattcaggcgaacagccacctttttgaacaggaaacgacataagacgggcttttcgcaaacagaaaacacccaatgcgcgagcggcgcatcgggtgttttttactatttcatattcttatttaatgtttcaacggcttttttcatttgtgtatcgttgtccgcaagctgtttttgcagatccgtcatcaattttgccgttgtgtctccctttataatgcctgtttgtttcagtttctcttttgcttggaattgtttaacggcttgttcaaatgctttatcatacgtgccgtttactttcacgctgtaccccagcgctttcagcattttttgcgcattggtgacggtggttccggaatccccgtatttgtatgtttttttcgcatctaaatacggcaggttcgcatattcaggaagcttaacctgatattgcggtttgatgccttttttatgaatccactctccgtccgctgtcagccatttagcgattgtcagtttaacggtagaaccgtcgctgtaatcttttgccgtctgcacggttccttttccgaacgttttctcgccgatcagcggaatgcccgatgattcatgcagcgcagccgacatgatttccgcggcgctcgcggtgccgtcattgacgaggacgactgtcggttttgtcacttttcgctctttcgtcgctttcatgacttctttcgtgccgtctttgtattcgacctgcatgatatttttccctttatcgataaacatgttgctcattttgatggcttcatccatcagtccgcccgggttgccccttaaatcgagaatgtatcctttcgctccttgtttttcgaggctgtcaatggctgaattcagctcttttgccgtcgattcggagaaggatgtgatttggatttcgccgatgtctccttttttcatttcagagtacaccgtttcaaccggaatggtgtcacgtttgatcgacaggttcagatcgccgacacccgctctgtgcagcacaagcttgacgtttgttccctttttgccgcggattaatgcgacggcttcgtttacattaaggcctttaacgcttttgccgttgaccttcaagatctggtcattcggtttaacccccgctttttccgcgggtgaccctttaatcggcgatacgatcaggatgctgccgtccttttcttccacttgtgcgccgatgccttcaaacgaagcggaaatggtttcttcaaaagactttccttcctgcgggtccatataagaagaatatggatcatccagggaactgatcatgccttttatcgctccgtctactaatttgctgtcatctgttttttgatagtaatcacttttaatctgctcgtaggctttattgaatttctcaaatttgctgttcgtcaaagcagccgagccttgtccgaaaatggtcgtattgcccgtgataaacagcgtaagcgccgaggctgcgaccgcggtgatcaatataataaaaaacagtttaaattgccgcttcaagaaaacaccacctttttattcttacattattatcatagacgaacgctcattcgtcaacttcaaacgtgaggcgcccttctttcccgtttacccaaacctatgcttttctctcaacatatgctgaggaaaaaaggaggattcggcctttgagcaaatatttagaaatgctgtccttattcggagtcggaggggctcaccccggcgggctcgctttttccaaagccgttctcacaaaagcggctcctcctcctggcgaaccgattcttgacgccggctgcggaacgggacagacggccgcttatctcggccacctgctgtaccccgtcacctgtgttgataaggatccccttatgcttgaaaaagcagcaaaacgatttgccgctgaaggcttaaccattccgggctatttggcggagcttgagcggcttccgtttgctgaaaatcaattttccgccgttctttccgaatcagttctcaccttttcaaatcttgattcatcgctgtctgaaatcctgcgggtccttaaacccgggggtatgctgatcggcattgaagctgctttacaaaagcccatgccggaaaacgccatcacgcagataaaagacttctacggttttaccgtattgcaggatgaaacggcatggaaacagagattgcttaagcaaggctttcagaaagcggatttcattcccgctgtctttgaaaacaatgcgcaggagccgactacagaaatggatttatcgcccgttattcagccggttcactacgatacgctgacggctcattacgagcttatgcagacgtaccgtgaatatatgggacactgcgcttttgtcgcttacaagtaaaacggcgattgtcctcctgttttcgtccaacctttttaccgcactctatcataagctgacatagaaagataggttggataggaggagaaaagatgcaaaactattatcatctttgccggcagcaccaaggaaaagtagcaagaattacagaacgaaacggcagagtccacgtcggaagaatcgtacgggtgactaacagcaaagtgtatatcgcccctgtcggcggccgtcacagaggatacgggttcggctattggggaggctggggaggctggggagcagcctacggtatcggccttggtttaattaccggatttgcgcttggaggtttactcttctggtaataaagaaagcccgctttctatttttcaagcgggcttcttcttattacactttctttacttcattaaaatattcttcaagcgttaattgatggtcatggatggcttttgccgcttttttgcctacatagcgtaaatgccatggttcatactcatactttgtgacattttctttgcctttaggatagcggatgataaagccgtattcatacgcatggtctttcacccatttgccgtccgccgtgtttccgaacgcttcattcagctcatatccgttgcttttgctggaaatgtccatggcaagccccgtctggtgttcgctttgccctggatatgcgacggcttctttcgcctttttttcacctttcagactgacttcattatcgaaaataactttctgtctgtcataagagcggtatcctgaaacggcaaccaggtcataaccttcttttttcccggcgctgaatagttccgccaaagcatcggcggcaggtttgcggatatatcgtttctcgattttctcagtaaaagaaaattcgactttcgggatcacgagatcattcggtttataatctcccggcagcgtgtatgtcttattcacgagcgcaagtgtatttgtcgggttttgaatggtctcaagcccgttcacttctttaatatcattaaaatatttgctctccaatacaaaatcgctgttttctgccttcgttgtttttttgcttgatgtgtcatctgattgttttgtttcagctgctgtttttgtgtccttgtggctgtcgccgcctgaaatgctgcagccggttcccacgattgcggttacgctgagagcggcagcgagcgagaaccatttagtggatttcttcattttacacttacctttctttttttgaatcagggcgatgcataaagaagagggctgctttaatcagcataaccctcatctcaagtttacgatacagtatgcagcgccagtttaatcatatcatgaaaagtcgtttgacgctcttctgccgttgtttcttctcccgttaatacgtgatcgcttacagtcaggatagacagcgcttttttgccgtatttagcggcaagcgtatataaagcagtcgtttccatctctacgccgagaacgccgtatctggcaagcttttcgatttgggagtcttcattgtaaaactgatcggcggtgaatacgcttccgaccgctacgggaagattgtttttttgcgcttcctggtacgctttatgaagcagttcgaagtctgcgcaaggagcataatctacactgccgaaggcgacacggttcatctgtgaatcagttgaagacgtcatagccaaaatcacgtcacgcaccttcacgtcattacggatggctccgcatgagccgactctgattaagttttgaacatcatagctttgaatcagttcattcacataaatagagatagacggaacacccatgccggtgccttggactgatacttttttgccgttatatgtacccgtaaatccgtacattcctctgacttcattatagcattccacattttcaagataagtttccgcaataaatttcgctcggagcggatctcccggcaaaagcactgtatccgcaatttggcctttttctgcgtttatatgtacactcatttccttttcctcctgcctattcaaactcccacccattgtacactgaataacggtaagagacaatcatcagcatgatcagggcgatcttgggcagaatatgcgggatgacaagcctaaagaaaaaggagtgaacataatgggcaaaaaacagcgcaaccgggtgaccggccagaaaaagaacaatcacgtgcccgtttcagacgtcattgcagctgatgaagcgcatggaaaagagcattccgccgctaaacggaagccttaacactgtctttcccagacaatacggaagccggctgaagattcagccggccccgtcttacctcggctggacgagcagccggttaattttgctccatcccgcagggttaagcctgtaataggtctttccttttcttccttcgtctatgagtatgacatctccggtcgctatgaatctggcttgatagtcgtttgggaccgtatcaggcacattaaaaacagaaaatgccctttccagtgcgtcttgatgattgtcagcggccagctctgtccgatagacgaccctgtatccctttttctcgccgtagcggggtgtttgaaaaatcgtcacatcataggcgcaaatcttttttttaaacacgggcagcgataacagcatcaagatccctccctcttatttcttaatagtattagcgttttttctcatttctcctgtctctatttttgtcgaaacggatgatacttttcgtcaaagagcgcaaaaagcgaaacgaggcaaagtccgagactgaatccggcaagcacatccgtcggaaaatgcgcgcccaaataaattctgctgaatccgatcagaatgacgagaaccccggtaaaaacggtgacggcccgttttcttttcgtgaaaaacggaacatgcttgatcaaaaagtaagcgatgacgggatacatcactgccgaattcatggagtggccgctcggaaaactgtatgaggtttcatggacgagcggttcaaaagcgggtctggctctttcaatcaattcttttatttttatgtttacaatccgttcaatgagaaagagaagcggcaaaaaaacaacatccggcgtttttttgtacatatacagagccgcgcctgtcaaaagaagaagcggcaaaagcaccgcggtcgtgccgagctccgttatccataacatcaattcattcagccagggagccctgatcctgacagccgcttctatgagacgctcatcaaaaacctggacggcttctatccggatcgctgctgcgagcagaataaacaatgcgaaaagacttgctggcttgtacaacgttttccccccatgtttcattctcccgagctgattgaaaaaaccgaagctttttcacttcggttccgcagtttcagtcttcatcaagctcttcgtctatcatacatttttctaataaataatcaaaggtgatgtcggctatttcgaagatttcctcttcactcggtatgtacccgcgcatagcaagctgactgtaaaaataatcagctatttcttctgtgtcaatcacaagatctatttctttcatgcaaacaccgcctccttttttatgttttatgaaaaaaccgttcaaattatacccgaaagttctaaacgttttgtccgctcatatacttttaaaaaacaagccccggagggagaaaagatgatgacgaaaatgatggctttattggacggagatggatttgatatcgtattggaaaaagtgctgaaaggaatgtcgtttgtaatctttgccggctgtctgccctggtttttatatgtcaccgtccgtttttttgccggctagctgaaatgctcccgcaggctttccagcacaaaattcatcatatctttatattcttcgtcaccgaacaaatgataaagaatcttataatcgttataaatatcaagcagctcatctacaatcgataccgccagcacatgcagggcatcgggatcatcagcatcgccttcaaactgaagaagagcagacgcgacggtatcctcgccgatctcatgagatgcttccccaacatagtggacaaacagcagctgatgtacaaactgatccatttcatattttctcagaaccagcgtgagatcctcttcctccgtttcaagccactctccgtctttcagccgagtcagctcataaataatatcctcccagccatcctctaaatatctccatatttcagttctgtggccgatgacacggaataattcctttccgtagtcctttacatatactacgtcgccgatcagaaattcatattcaatatccaatttttccatatcgacgatcacgccctcataatctttataaagctggatggacgattcaaaataaagcacttcattatgattgacttcgtaaagataatgtttatcaatttgatgaaccttcgtaatggtgccgacggttccgtacatcacgacgaccacgatgtctcccacttgaaatttcggtttatctggcttcatgctgtctcccccttgccgcggactgtcatacgctatcgtatgccggccgccatcatttcgcatgggcatgaaaaccacaggaaatatctatttctgtacctgttcaaaatggcaaaaaccgcaacatgcttgtgcgttttttcacttaccgtaacagaagcgtccgatgacattccgctctcgatcgaatgagcagtaacaatgctgagacaaaaagcttctattttttatgagtctttgtttttttctctatgacgcaaaggtaaatacccggcccgaaggcatgttgacaatatcaccgccgtgatgttcaagatttgccgtgaaacaaatcatcgaaggtgtatggagattcaattcaggctgcatatttgcaacagaaaaaaaccgcacaatgtgcggtttttcgtcaggcgtgatgcacctcggtctcatatttttcccaagcttcatcaaatgtcgccatcgtttctaaatagtcggcgctcagttctaaataagaactgagctcgtgataatcgcttgacgttttcggaaagccgtgatcttcgtatgcctgattcgcaaactggctgattgcgtcctgcggcttgggatgcctgtatttcatcaaatagtgataaaaggatttcatgggtttcccctcctgatgactgtcttttgttgtactattatacaattcaagtgtgaaattacaacaaaagaagactaggagaagtcaaaataatttcgtttcaagatccgttctgtctccatcagctcttgatatgtgagtgtttccggtaatttttttgcttcgactaaaaaaagctgattttcgatttccgctatgaccgcttcctcctgataagtcatgccgcaggaggaacaggcgaatgcgggtgtttctgtaatttctatggccctcgtaccgtcaggaagctcccagtacacagccgcctgactagctgacgccttctgattgccgcaccactcgcatggcttcacggcgactcacctccgacttccgatcctgctttttgctctttcttttgctgtgcaataaatttcttttctttcaattcatctctcttttccctgcggtctttcagcgtttcatgatcagggtttgatgtaaacgttttcctcctgtcgatcctcgatacattttccggtgtgaacgaaacctctttgtccgcgaaaatggcgctcagtccgaccggctcgtgtttggccatcgttcccggaaaaacagattcaaaatagtcgtcggcttgattcgggatatagttttccggctcgggataagatgtaatcaccccttcgaagtttctgatcacaactttctccggactttgggagagcaagtagttcggctgcagggcgattttaccgcctccgcccggggcgtcgacgacaaaggtcggcacggcaaagcccgttgtgtggcccctcagtccttcaatgatttccagcccttttgacacaggcgctctgaaatggccgatcccctctgacaaatcacattgataaatataatacggacgcacgcggattttcactaaatcatgcatgagttttttcataatcggcaccgaatcgttaatacctgctaaaataacggcctggttaccgaccggaacacctgcgttaacgagcttttcacacgccgcaaccgattcttccgtcagttcgatgctcgtattaaaatgagtgttcagccagaccggatgatattttttcaaaatctgacaaaggttatctgttatccgctgcggaaatacgacgggcgctctcgttccgatccggataatttcaaggtggggaatgtcacgcaggttttttaaaatatattccagaatctgatcgttgattaaaagcccgtctccgccggaaatcaggcagtcacggatttccggcgtttcccggatgtaagcgattgccgcatcgagctgttttttcggcacccccattccgatctgtccggaaaaacgccttcttgtgcaatatcggcaatacatcgagcattgatttgtcaccagaaaaagaacgcggtcgggatagcggtgcgtaagcccgggaaccggtgaatcttcatcttcaaacagcggatcttcaaggtcatatttcgttttgtgcatttcttctgacagcggcacggactgcatgcggatcggacatctcgggttatcgggatccattaaagaagcataataaggcgtaatgttcaggggaatggtttttacagacatcctgacgccttcttcttcctcttcggtcaaatgaatgacttttttcaggtcatcgacggttcttacagtatgggtgagctgccacagccaatcattccacttgtcttccggcacatctttccacaattcaatctccttccaatgacgcttcggctgaaaccatttgtttgtcaaacgaattcctccttatgaatggccaaacgtaaagtcttgcaccatatattcatattttcgagcccttctgaaatgcggcagttgttcacaagcctgcctctgtagccgtatccggcatgatacaaaacggcattcatcccgtaagacgctgcacgggccaaggaaaaaagatggatgattccccggcccgcgagttcctgctccaacgctttaaacaagtgtgccgttacggagttccccctgtaatctgacagaaccgcgcaatcggtcatttcagcgtgccccaataccggattgatatctgcgcttgccgccccaataagacgatcctgatcgaatgcggcataatagatggtgttttctctcattgtttttttaatataaaggggattaaagacaggagtcggataggtaagaaaaacatgtttatataagtgcgttaaacggtctgcatcatcttcgtccgcttttctgaacatcagcgcgctttctgtctgagtcagtccccgccgcggtgtctcatataaacggtcaacagtcgaatcttctgatacatatgaatctgaccgtctccgttcctctgataaatagcgcaccatcacaacagcctcatgcccgttgtaatacccgtctatgacaccctcaacaataaaaagatgcttgacaaattccggctcatcgccgcgcttggcaaagaaaattaccttttgggctccttcttgctttgcttctgccaaaacggccggaataagcgccgtgatctgtccgtcataacgaatgactctgagccgctcattgaaacggtctgcatcaatctcggccgctcccttttcagccctcagttcctttatcagctccgtcacccccatctgccaccccgcaccattccatgataaaaagagaaatgattttgacggcatcgattaacgcccggatttcaatgtattcattcgcctgatgcgccgccttgacttctcccggcccgaagacgatgaccggcgtctgtcccgcgtgctgcaaaagccctccgtccgtaccccacggggacgcttcacgaaccggttttgcccctttcattttctcaaaagaagattccagagcggaaatcagcggatcctcatccgggagatcattcggaagccactgagccccaaaccattctatttccgccgggtggtgtttaaaccactcatcccggtactccaaatctttcagccagcttgcgagctcttcttttactgcttcgggcgtttcatccggcgctattccgcacctgccttctatcaccacacggtcagctaccgatgatggccacgttcccccttggacggtgccgatattaatgggaaccggaatcggaacgtcccgataaagcgggtctgtgatacgggcgttgcggacgtgttcaagctctttaagggctgtgatgacatgcaggcttttttcaatggcgctcaccccttcatagcgggtgccgccgtgtgcggacaatccccttaccgtaatgcggaaccacatagacccttgctgcttaacaaatagctttaaattagtcggttcgggaataagcgccccgtcagccttgtagcccctcataacagccgacagcgttcccgcgccgccgcactcttcatctacgacactttgaaacaggacatctccttttaacgtaatcccgcaggcttcaagcgcttctaacgcaaacaagagagctgtattgccgcctttcatatccgttgacccgcggccgtaaactttgccgtccttttcaacagcggtaaacggttcatacgtccatgcggcgggatttccttccgggacaacatcaatatgtccgttcagtatcagtgatcttccgcccccggcccctttctttacggctgtgatattcgggctttcatggaagtcttcgcgttccgatacaaaataaggatgctctttcaaatgtttgacactcggctcccatacatcaatatccatgtcaaactgtctcagtttttctaaaacgactgcctgtgcgttaaattcatggccgaacgtgcttttttccccgatcagccgtttcagcaagcttaccgcttttgctgtgttttcttccgcccactcagtgactttcttttctaattgatccatggacaggcccccttttaagaaaacattctcccaatctgatctcggcatccgttgtttgaatgacatcgtctatggtcgtgccattcagcagttcctcaagaacaaaagccccatcatctatgctgatgacggctttctctgtaatgatgagatctgcacagcccgctgctgtaagcggcaatgaacagctttcgaccagcttcggccggcctttctgatcggtgtggctcatgacgacaaccacttttttcgcgccttgggcaagctccatcgccccgcccattccgggcactttttttcccggcacgagccaattggcgagatcacctgtcctgctgacttggagcgcgcctaaaatggtaatatctatcagcccttttctgatcatggcaaaagacagagctgaatcaaaataggaagcacccttaactgtactgacaggaaacccggccgcattgcataaaagctcatcctcctctccgcgctccggactgccgccgatcccgaggacgccgttttccgcctgcagcatgacctccatgccggccggcagaaagttcggcactaaagaaggaatgccgatccccaggttgacaatcatacctgaggtaacttcactggcggcccgcctcgcgatactctctctttccgctattcccaagcccatttccacttcactccttcactttgcacgacaccctccacgaaaacgcccggcgttacaatatgctcgctgtcaagttcgccggcaggcacaatctctgccgcctcagcaaatgttctttcggccgccgcagccatcagagggttcatgttgcgcgccgttttgtcaaacgtcagattcccgaattcatcagcagtatgtgccgacacaaaagcgaaatcagccgtcagcgctttttcaactaaataggactttccgtcaatcgttacggtttctttgttttcacaaacggttgcgttatcaatgccgatatcagttaaaataccgcctagccccgctccgcctgcgcgaatccgttcagcaagcgtcccttgcggcgaaaattccacctcaagcgctccgtcagtcatttgtctgcccgcgacaggatttgagccgatatgggaagcgatcagcctttttacccgcttatgaacgataagcgggccgatgccgatttccggaaatccggcatcattgcagatgacggtcagctctttaacgccgctttccaaaatcgcttcgattaatgacggaggtgaacccactcccccaaaaccgccgaacataatgacagattcgtccttgacatcggcaattgcttcatgaatatcgatttttttatgaaaaatagacatatcagctcaatccttcttcatcattttttcaacttcttctgcggcctgggaaaatagatctgacagctcatccagctcggcatatgaaattgtgaacggcggggcgatgatgacggcgtctccttctccgctgtcaataccgggctttgcagggtaaataagcaggccccgtttttttgccgctttaatgattttttcggtgaaggcctgttttttcgaaaaaacgtccttcgtcgttttatccttaacgaattcaaccccgatcaggaggcctttaccgcggacatccccaatcaccccgctgcgctctttgatttcttctaatttccgcttcagcattacgcctttctcctctgactgccgaagcagctcgtgtttcttaacatagcgaagcacttcaagcgccgctctagcacagtatgggttggcactgtacgtatgtccgctcataatgaccccggagccccgcttgatcgtttcaatgatgtcatcagacgcaacggctgccgctatcggagcgtaaccggcgcctaacccttttccgagcaccgcgatatcaggtgcgatcctccaatgctcagaagcaagcatccgccctgttctcccgagccccgtcatgacttcatccgcgataaacaaaataccgtaccggcggcagacatcctcaagcgcttcataataacctgccggcggagtgatggccgccccggctgctccgacaatcggttctgcgacaaatcccgcgataaatgagggaccgatccgctgaacagccgtttccagttcagccgccgcagctttcacaaattcctctccctgcagctctgaacgatacatattaggcgctgaaacggcaggaaaccgttcgagcaactgggtgaagcggtatctccgttcgtagaaccccgataatgaaagcgctcccaaagtaatgccgtggtaactgccccatcttgatagaaagacggatttttggtattgccctttttcctgccaatattgaacggccattttcatcgctgtttcgactgcctctgagccgctgtttacaaaaaatgaccaattcagcccgcccggcagatgatccgccagaaataaagcgagttcttctgccggagtactggtgaattgcgagcgatacacaaacgaaacggagtcaagctgctcttttaaagcttgtataatatcctccgtgccgtggccgatattgcaagtgaccgcccccgatgctccgtcaagatacttgttcccctcctgatcatacacatatgatccctttccatgactgactgacggataattcccgtcaagctccggtttgattaaatagctccccatatctttccacctcgaaaacccatttgcttcattgtatgaacagatgaataaccgcattcttatccttcagaaagttttttgcagaaaatacctttctgtaaaacaggctgccggagatgtcccgacagcctgaagagcgttctggaaattctattcctattgttgattttattctttgctcagctcatcatccatcatttttgatctgaatcagtataagcagaaggcggaaaattcccgtcttctttaccgtatgggaatcaatatttcacacaaatgatgattcaccttttgtaaagtatacctttcgataatgggctgctctctgattgataaattatttttttcgatctcagaaaaaacagtgttccaaaatccactgactgcctcttttgtatgatcaagcaagaaaacagcgtacttccctccggaaaatgtaccaatccgggctggttcaggcacatggtcttgattgataacaagacaaacatcatagcggcatttctctttaggagtacgattcggatgatcttgcggaattcctaaaatgacagaatgacaaagcagaccattcaattgcgcccagtttttaaatgactccatcagttcattgttttgctttccgccatactctccgatgtttcggaagtaagcaattctggattcaggtaattcttcaatcgttatgttcacattttcgcccccttctccagaaaggtaatatgtattaaaatgtttttcaagctgatttttcagcatgggtataacaaaaagcctgcagaaagtgatgttctctgcaggctgattttcaatataggatttttttcagtctaacaaataaaagccgcaccgacgatgattaataaaataaacaataccacgatcagcacaaaagtgctggttccgcctccgcagccgccgtgcccgtaaccatagccaaaactgccgcaaccgtagccatatccgtatccgtacatgcgcaaatcatcctttcttcttacgatatacggcattgtatgcgggccaactcccaattggtttatgcgaatgcccaactatgtaagaaaataatgaaaaattgtatgcacgcgccgaaatcttttgaagccgagtttttcataaaagcggtttacaccgtccatcccggacgtcacaaggtatacggtttccatgccgttcagctttgccgccgccatcagctcattcatcaatatcgatccgtagccttttcgttggaattggtccagaattgcgacttcttctatttttgcggttttatctgctttgttgatgaaaagctctccgcagccgatcggaatcgtttgcgaggcgtcgctgtagcacacgacaagcataaccgttccgtccttatacaaaggatatttccgctcaagcttttgttcggccgccgcctcgccaatgtaaagggcatcatagatgttcataatagacgacccgtcggcgaggcttttttccgtcccccaagcagtgagcgggtgtccggcctgcaggtccccattttccagtttccttgcaaaaaacagctcatcttccactacgcagccctgctttaccagattttgtttcagaagaagcggaaacgcgtgctccggagccgctttcacatgaatataattggcttgaagcatgcccggaacggacgaaaaaaacggcagcagtttgtctaacggaaatgtacggtgcagctgaacaaagttatgcgaaaaaatctgcggcaaaaaagggtccgtatatacactgaaatgctcgaacctctgaatgccggaagtaagctctatatactgcttctcggttttatcaaattgatcggtcataaaagctctccttttccttacacatccaactgcatccctcaaccttttgttatattgagatttctcataatttcatcgtacaccggatagaacggcattccaattggtaattgtttaatttgctgaaaggaaatgggtatcgccttctgattcgcaaaaaagcgtttcgctacgtcatgactgatcggatggagaacccctctcaaataaacataaaattcccgttcaatgcgaaacagcattctcccgggcagatgttgaatacagcccgatgtcccccggctgatcggcggaccgtccggaagcgattgtatttcggcccgctctaaagccgggatgtcatgccgtttaaatcggtaaaagcgaaatgcgctatgatcaaccagccttttctccccgtcttctataaaataaacatgaaactgatccctgacgagctgaaaattcggaatactgacggagttctcttcctcatattgaaataaaaacggatccggaatgacgacggttcggccttcatataacgaatgccagcgctcgtttacaggcttccttttatttcggtcaagctgatatactttctgatccgtcccctttacaaaggatccgtcgatcaggacagacggaagcgattgatacgtgttttgaaatgagtggggtgttttataggtcgtatccaacacttcttttatcggcagaaatgatgtaaatgtgttgagcctgctccaaaaaacagagtctccgtgattccaatgcataacatcttcgtcccaaaagctgccgaacttctctttcacacgctcaagcaatgatctccggtgcatcactgaacagtggtcaacgagaaaagcggcctgatctagcacctcttcagcaaaacgatagaagtggaattgttctgttccgcgcccgtttacatgtatcaccttctggctggaatagacggcatcaaactcgctgtattgattaagcgcttccgccatgcggctgagcctatccggatgaaatacggtgtcgtctgtcaaataagtgatgtattcgcctttagcccgtgaaagcgcatcattaatcaaaacggcataccgggtggacttcagccgttcggcaggattgataaaactgttgtcataatatatgcgaggatcttttatatacgtactgatggcagccgaggtttcttcatttgaatgatcatccattacaaacagctcccaattgctgtaggtttgatgcaaaacactttcaatcgcctgtttcacaagatccggtttgttgtaactcgttaagataattgagatcttcttttccatcccatcaccccttctgtaaaacataaaaaacggctccgaaagagacagagcctgatatccgttattaaaaagcaccccagctgacgatgcttgaaatcgcgacgtttgatctcgtattattgagcggattttgaaaaacggccaaatctgacagcacttctttgacaattacgttttgcagtgtgctgccgttaatcagattgacgcgtgatacaggaaccccaagctcttttgccattacaagctgacgccgcaaatctgaatgatctccggacggctgacgggataacaaaagaagaagaagcagtacgagctgaaagtcctcctcaaaacccccgtgttttacagtttcttctgaatccaaagtattcctctccttcattttttaatctatacaacgtatgtcatactcttacaaaccgcataggcaaacaaagcctgattcgaaaattcagctgtttgattaaatattgaaaaaaacacaagcaaaacggcattcgacttataccaatctcttcaatcaggaatatgaataaacgtgaggttgaaattgttaaaggaggtgtatgtccgcatgagcgaagatcgtttggagcttaaaaagaacttattgaaaactcttttagcccctgtatttgacaacagcgctttatctggcggtacagatggaggagataacgtgaaaaacagcgtaaaagaattattggaagcggcaattgatgcaaaagtagatgaagcagcggtgaaagacagtctcagcgcacaatctgtattgggaagcggtatttcattagcggcgagatggatttttgcaagaattcagcccggcactgtcatcagcattgtgatggattcaggagacatgatcggcccggttcaatttgttgcctttgacgaaattcacggaatcgtttttgttacgcaggaaaattccgttacaccggcaggctctgctacaacattgcttgacgtcgacaaagttgaaagtgtcacgttcacttcgtaacagcatatgaacgttttatatatccgttcaggatataaaggcatatacacgtattttgaccgctggatcgaggaaggctttttacagtcttccgtccgctttttttctgtttctgagtttgaggaagataccatccgcagtatacgggcattcaaaccagacatcagtctgatgatgacgggagaccgtattccgtctgaatggcttcaatggctgaagacagaacagattcccgtttatctatggatgacggaagatcctttttatttcgatgtgagcatgacaatcgcccctttcgccgatgccattttaacgatagaacaaaacgcgcttgatgcttaccggcaaatgggcttacagcacgtatattatgtcccgatccccgttaatcagcggctttttaagaaacaacctgctgaagcttctcttcacacaaatctgcttctgatcggatacccgtacccgaaccgcgttgaactggtgaaagcagcggcgaagcttccgtatacgcttcgtatcatcgggaagggatggcgcagacatctgcctaaaaaaatcgccaggcagcaaaatgtgctcgtaatggatgaatggattgcacccgaacgtgccgcattatattacaacagtgcagacgtggtcttaaaccctcaccgttcttatcggtttgcgctcaatcagaacgtacgcggcatcgaaaatatcagtttaaatacgagaagcttagacattgcggcttgtcaggcctttcagctgacagacctttctcccgcgcccccgttttcatcctttgtttcttacagcgggcttgcggattttgcggataagatccatttttatatgacaaacccgggtgaacgtaaacaaaccgcggcgcttaattatcaagagacagtaccggcgtacacgtatgaccagattccggctgtgcttgcggctatccgttccaagactttctcatgaaacgctcttcacatcaaaaagcagcttggataagctgcttttttcatgtttattttccgcttctgtcagtcagttttctcgggtcaacctgtttattgacctgcgggtgaaagccgattttatcagcgattctttcccatggcaccattttaaaattttgattggccttttggccgtgatctatattttctccgtcctgtgcgacaaaaaggccgaacggatattcaggtcccagcccgaaacccagaacgtcaattccgtctgtatcgcttgtgccgtctgtctcaggcccgtctgttatctgaaagtccgcaacatatttgttctgtccctgtctttcataaatcgcgtagctgctgttaccctggcttgatgcaagcaaataacctttcccgtcagcagcgtagtaaatcgtcagtccttcaatatcaggggttaaatgcctgccgtcggcacgatcgataaccgttccgttactgccgccgtccggctcagcgctgaacttccagatggcctcatcttcttctgcgatataaagactgccgtattcatcgtctgctgccatcccttctgtctgagaattcattttaaacgcccttacctttttgccggatatgtatccatttttatcagcatttaattcgtattgttcaaattcgccttctttccctgtcaccatcgcgtaatattttcctgttttttgactgtggtacaagctgaaaccgtatacttcatcaattgctgacgcaatcgggcggtctgggttcgtaatgctttgtaatgtgccgtttttcccgtcaatggcgtaaatctcaatggtattctttccttcagaccgattggatgccgccgcaatatcgactttttttccgttcaacggaaaatcatagcggatatcaacattgttcagcttcccggtaggataggaatgaagcatctttccctctaggctgtacacgactaagcctgattttttattggttgtgatcaatttgctgttctgaggattcttggggtccagccaaatcgcaggatcatcagctgcatcacctgctgtatcaaccggttccgtttccgccgccgcattcacggtaaaatgataaggatcagacagcttatgcttggcctgggaagaaaccgcaccgcatgtgagcatcaatccggctgccgcggttaacaaaagtgtttttgaatgattcattttccttcctccttttatgaaagtgtactttaattgtaaaatacatacaggaatgtcagtgttaagtttttgtgaagattgtccgcatgtgagaatttatgaagagaaaaaattgacgtgagcaaatatttaaaatgaacgtttagtataatgttttatttgtgatttctagtctattaatcgggtaaagcgatatgaaagcgcatcagattaatgtttttctctaatttttgatttattggtttctttcattaactcgctgaaattgttcaacatatgatgcatggtagagaaacgagagttggaggataagccatgcctaaacagcaagcagtagagctacaaccgttttttcacgataaaactgttctcgtcacaggcgggacaggatcaatcggaagccaaatagtaaaacgccttttgctcttaacccctaaagaagtcattgtgttcagcaaagatgacagcaaacaatatgtgatgaaacaaaaatacgcggatgaacaaagactgtcgtttgtgctcggcgatgttcgtgactacagaagagtcaaccaagtgatgaaaggtgttgatattgtctttcacacagctgcgctgaagcaggttccgacatgtgaggataatccctttgaagccattcaaaccaaccttatcggcggacaaaatgtcgcagaagccgctttgctgcaagaggtgacacatgtgattaatatcagtaccgataaagccgtttattaagatacttactactaaccaattaaaaaaagaagcttactctgcactcctttccaaagcagcctccaataaatgctgagcaaattgtttataaaattcatctaagtcattactggcttcatcctgttctatatagcggatactgtaattatctttatggacaacctttattgttttcttcttcaattcctcataacgttggtaaggttccaaaactacacccccgctttcacaggagtattatatgtatgtaatggttcgtctcttgactgttctttctttatcaaagcctcgcaagcttgttcaaatgtatggttaacttttttctttatccagcgttcagtaccgatttcatcaaagatgaaatcggtgttttgtacttgctttactttttatataggtatgtgttaattgattttcagctatgttcttatacataaggaaatcatttatatgtacgacataaactttattctctggctctctaaaccattcaaaatccgcagctatatccacccttttgcgaatttcctcagacctgccttcgatattttcggttcatcaagtgttcattccttccatattatcagttcatttacccgtacttctttaatgcagcagcagcctcgtcaacacaaatattccgcaattccgaaatctttatctccttctttacccatcattcttgtatcttttgtttccaactaaccgcctccttaaaattttcaccgaagaaatttacactccattcagaaaattcaccatatattcacaacattctccatttatttcaaaattaattgttataatatagttgtattacatacctaaaccaagggagatgcttttaatgaaaaaaacagcaattgctttattagtttcaactatcggtcttactggtgcagctgcttcagcgaacgctgctgctaaaagtgagccagcttccctgcctcacagtaatcttgaagccttaacaaatactgatagcttccatgttttaaaaactggcacagatcgcaaaaacggtgtaggcaaagtcaatctagctagaacagggccagactcatggaagactgtagtcagcagcttcacaccaaacaatgtaaccaagatctctctgatgggattccaagaatcaggcgcaacgggcagtgcctctgcggatgtgacgtatgaattagtaaagtcagatggaactgtagtttctactgttagaccgagcggaggaaattattcaagagaacaattttacaaagtatttagcgtcaacacatcaagcatcacaggaaaacaattgtatatccgagctcataataatgacacttcagcccaagtaacagttaatgtcgatgtttactgggactacaattattaatgcattgagagggtttccctctcttttttatttttaaaatatttgtttaaaataataatgcagacttgtgcttaaactgaataatactcaagatgcttatttgctaatcttatatttgactttgttgagttcatccatcaccattttaacggtactcagtaattcaaaaatatgttcttggtatccggtcctgtggtctttttcaattactctctaattatcattcagcctttgaaaatataaatgtgtctttttcatcatctgaatcgtcaaataaaccttggagcaggaatgcttcatatatagagcctccgtcaatgaacgttacttcttcactaagtatcccattgagcgctcatcagctttaacacatcgtcaacagaaaagatcagcggatgaggtgaggtttgaagacattattgctgttcaatatgacattccctagtttattgctgttatctcttatccattatttattgttgcgtttgtttacagcataataaacagcatgtcatgatccactctaaatttgttcttaaaattacgattttaagttaagtttaaactgcattatgttgagaatatcacctttaattggtaagctgatatctaaggtcatacttatacaaagcaggtgatatattgaacaaaataatcggaatgaccggattaattatctccttacttgtgcaagggttctcagcaagtgattcattgactcataagatcgccatggcttgtctatttttgttcttattggtttataattttaaccatactaaggagttctctaaaaagtctctggcgattataggcgcttcctttattgtgctaatgcttggaatttatcaattgctcttttttactggtgattactttgaaagtcgcggtttaaattttggatttatcctcttacttgaaattgttttagttattggattagtgactgctgcgctgagtttaattaagcatattgcagaccgcttaaggaaaacacctgatggtaaagagcgttgactctttgcctttttttagctaaccatttctttttatgccgtctttctatgtacaaaatcaaacgcaatatcgacttttgccggctctcttctgtcaaatgatgaattgactccagacattgcatcttaatggactctttttcatttttcaccagaatttctcgatcaattacctttttgacactttacaaaagatccagtcgcattgctctctttgataagaactctacatttctaatagcaagattgaatattgtttgttaatacacttggccccaacttttgcgtcttagaatttgaaaggcgcacttgcactttaacatttgtcatttcagctgatatggaatcaacccttccagcccaattagggctctcacttttcctcgggagtcggatatagtttaaatcgccaactgatctcccctgttttggaggcaaatccttcataaccgtcgtagcttccataagaagatggctgaggaaggtggacagcaagaatactcatattcgttcttgcagcacttggcgggtataactgcacttatagattagtgccgcacccttcgcatttttcagtttttgatttaccggttcgagtactgcactacaaggcattggacttgctttcatttgagttggagaggcaataacagcagccaataacggtataaccaagataaatcgtttcatctacattccctcacatttttttgttaattccccttactcccgccttgaatattcatcacttttgaatggttagcttcattaaaaggtgaaaaaggcagtactggagctactggtgctgccggtaaagatggaaaatcagcatatgaattagcgttcaacaaggtttctcaggaacattagatgaatggcttgccttactaaaagcaacagcaaactgatcccgtacccttctctaacaaggaggattctatcgcattccataccgaattgagaaattaagaaaaaacacccttcccaacatattacattatgataaaatattacataatcagacgaaatgctaggagggtgatttttttggagcaattgatctcttcttcaaaagttggcttaaaaatcaatgaatggtacaaatacataaggttattcagtgttgcagatgcagaaatcttgaaggaagaagtgaagcaagaaatagagcttatggaagaagatcaagatttattgttgtactattcgctcatgtgttttcgacatcaattaatgcttgattatcttgaaccaaaaaccatgaatgaagaacgacctaaaatttcagacttatcagaagagatcgaaagtaaacaaagcgatctaaaaggaattcttgaatattattttaacttttttcatgggatgtatgaatttgaacagtacgaatatcttaaagcaataagtttttacaaccgagctgaaaagaagatatctattgtccccgatgaaatagagcgagctgaatttcactataaagttgctgaagtgtactatcacatgaagcaaacccacatgtctatgcatcatatcgttcaagcaatagaaacctacaaagcacacgaaatgtactcaataagagtaatccaatgttcattcgtcatcggtctgaattatttagacatggagtatccagaaaaagcaataccgcatttcatgaatgcattaaaacaagcacaagaaattgatatgccacggttaataggttcttctttgtacaatctcggtttatgctcatttacaacaggacatatggagaaggcattggagtattttaaagaaggcgtgtcaatttatcaaactaattctcttcacaattctagccgactgcttgacatacttttaatgttggcaaaaacgcactttaaattgttcaacacgattgatggaaaacaggtttgtaaacaaggtctcacgctatcaaaggagttgaacgatgacgtattaggaaaaatgtttgattttcttatgggtttattcgttgagaatgacaaagaacgactttttaaaatcttagattacttagaatcaaaagctatgctttcagatgtggaagacctagcgactgatgcagcaatgtattataatgtaaatgaagaccataaagtagctacagccttttatgagaaagtgctttatgcccgaaaacaaattcagagaggggattgtctttatgaaatttaaatttgcatcggcttttatctttttagttatcttacttgggcttgttggacattatcttcttgacggccacaaagtttttaaagaagcccgaagaggccatacagccagtatccacatcgcgcttgatcaccataatgacttctcagcggaacgccgagggcaaaccgcataatgttttggcactcccatataagggggtgtttttttatgctctgtgttcacctgttaaacctgctctatgcaatgttgtgctccaggtgtataaaagatcgcttttgatctgtatttatttctgctcaaaaagaggaataaacaaatgtttactcctctaactcaagaaataacagggccttcctcatttcaaatacaattaagagactaattcggaactctaaaggtttaccctttgtttgaaatattaaagcatactgctttgttcagtcatctcctgatagaatattttattccttcccatcctaagcccgatccctccccccaccaaaaggcatagcgtctatccgataatcagaaccatggtttaccatgactcaaccaacatccaattaatttatagctttaaaagccgcatttatattctgagtaaagattccaacttgtaaaccataggatacatcattagattttgaaatagcgttttcaagatcttcaattgaaacaacagggccaaaaacttcacttagtagcaagccgacagtcgtgaggtatgcactcaaaacctgttggataataaaatgatccctctctttttccaccacaaagcaagtctgcccctttttcaaaatcctcatttacccaagactcaactctatttgcttcttcaacagaaatcgtaggcctaatagatgaacaggattttagaacaacagatattggttgttgtataactaatgcacccgatagtttaagtaacccttcacaatctttttaggcctaactctgatttaatgtgtggagtggtttgaaaaagacgctcgcccttttccatgatagaactaatggcctctaaattcatgaaggagatcacttaactcttcgttctttttaataaaatgataaaggtaatcctctgtaataataaactgttttccatgcttatgtttagttgctaaagtctgtttaccatcaccatcggttattcgaaagctatgaataattctatttctcatttcaatgatttcagaaaaacacgaagtaatttttgcacctgaaaacttagttatagtttcctttattggttgactaagttgaccagaagtatagtcaattaattcttgccaattaaacctgttttccacatcatttttaagtatattttcaatgataaatgcattgttagagttgaaaacacagattgcgctttttaacaactccctatactttcttgacggtaaagattgcttactatattcttcatacattttcactattctcctcgctgttcaaggtaaactttattccttttattcattcataaattatttattaatctcgtggcatggcgctaaatcatcgaatgttctcatcagcgtttcagaggatttaccaagttaatcgtcccaatcttcgtcctcttcccaattttcttttgcttcttcaagctcttccaagaaaaattgcagaaagttatctgcaaccttgtcaccataaccggcttcatttgcccaaactattacaggacattcgtcgttttccattttgtttgtatcaaggcaataagagaattcatctacatcttctataacgataataccgtcacttaaattataataagttctatattcctcagtaactgtaacaacccttgcagaaactttcccatggcctagtatatttaccccgtaaattccaccggagccatatttatttaaaaaccacttataactctcgggaagttttacatttaaacgattttgtatctctttgattttttcttcacttattccgcctgtaaaatcatcatcttcagcgttttctttaataaattcttcaatttcatgataagtcattgttacatttctcctttctcaaattggctcgctctccatttccaatatcttcgttggaagcttttatactgattccgcaactccctgtcatttctaaaactttccccaccttttttcaatccatggagaacttttttattattttgatgaacagaagctggaatttccaccatcgttcctggctcttcttgaattacatgatgtaagttgatttttgtgccatcattagcaaaaggagcgtcaccttttttcataagttgtaaatttgtttttccgctttcagcatcaactttgtttatatcaatatctttcaacgtgtatactcttcgacttacatctttagttttacccgaagcttttaccttccctttaacttcaaaggcgccatacttctctttatttagccaagggagagttaattccttacctgtaaacggctttctactctcatctaatttcttcgcattagttaatagttgatttttaaggttttggctgtcaaccacattgtatggtacgtcacctgccagagcaagatcatatttagagttataaggaagcagttctggaagtttaacgtctttaattttcttccctgcctgtcctgccttgtttatgactttccccgccgcatcagctttgttaacggctcctgcgcctccgacgacagccacagctgctgaaccaattgcatatgtcacccatcttgatcgggaatacgcatctccatttaccatatctttttgatacgactcttcaattgcctctgcaacagcatcatatgttttaacaggatgaagtactgcattccccagtgctgacaaggtttctcccggatcggttatgaagtcccatagaccggttaccgtgtctttcccgacatcatataaaccaacgccgtctccttttaaaatatcccaggtcacttctccggcttcttccagctgttttgcttgttcaagctgaatgacatattgctgctgagaaggttcaaagttttcatagccgatcttcttcgcaatttccaaatattcatccggatcggtcacaccgtcagcgagctttttcttcagatccttgatttcccgctcttttgcttcttccttcttaaacgttaaatatgtgtctgagtgtcttgcaatctcgccttttttcttatgtatgtcgctttccctgtacgccttggcgttatagtgaagcggagtggcgtttttcccttttcctgtagcgttttggagctgctgaaaatctgcctgaatgaaatgttcgtttgcctcggtttctgcgtattctttcgttagatcatgatcaagctttccgagcttatgtatggtttcgcttctttttttatcagctgaagacagcttctgctctgtgctttcggttgaaaacaattcgagcgagataatgtcatcgatctcatccaagatggagcgcatatcctttttctgctcctccataattgcctttgatttactgagggcgtgggtgagttcatgctccagaaatgattcttctacatgagattcggaaagacctgcgtcttcgactttgccgggaaggcttgtgagaaaagcaattttcatatcgatcagatcaagccaactgtctgtgacaccggcgtgatcttgaaaaaaagctttaatgttgtcagcacctttgcctgaaaactcactgtcatctaagtcagccattccctgataggctttcctgagagtgataaattgcgttcttagttccttgtactctttggttcttttatccacttcagaaagtaatgacttcgcttcaaacaccttcatatcattctcctttttctgacactcaacagtctaaatttcaccatagtataggagagttaatgctattcatatagttatttttactcaatccattgtccataaaagataaattactgaataagtccttcgctctccaaggtgttatacattactcgcagtgtttttaagcgcgtatttatcgtgctatctgatagatctcgcttcttttcctcatccgatatataaacgttccccttaaattgcacccaatcatcgcgcatatagttattttgtagtgccgtattgtatctcgatcaatagccgtaggagtcggctgttcttatcgtgatgaacgtttgaaatattccgtcaaagttaccaagatcacgaagtttacgcctgcatattcgtttaatcggtttccccttccgaacatcatccataaaaaaagaacgcctcctattccagtttaatagaataagaaacgttcaaacacggtaacggctcacggctaccctgtgccttaatacgcctaagtcatcgactaagtcaacgcaataaaaaacggctagaaacgttgatataacgcctctaaccgccgtagatgattccgactgagctcgaaccagcgacctctaccctgtcaggacgagacacgtattctgactaatctttaacaatcctaaataattgcccaaacccttgtcatatcaaacttcgggatttagtttcctgattgatatttgttgtttctaagtagtttaaaacgtttgtgtgactccatggtgacacgaaaagacccgctgaacaatttgttatggagtaacaaaacaagactccatcattgccgacataattaaagtagtgtacaaatcaacataccttcaccttgagggtatgcaaaagaaccgtttcattgactaaaatcaaattgagttagttcgaaaaacgcgacttcgaaaatttaggtatcgctcaccttggtctcactctgcatttttgtagactgaacgattcttcacccagcaaaaggaaatgtctgttttgatccaaaaggcaatttgttcgtttgctctaaggagatacactatatacaatatatagagtggacagcagcgcactaggttcggaagagtgttccgacctttgacctgatcggaataaagttccgactgatattctctttgttcaatttcatcattcctttaatacaggtcgttgttatttctctagattaaatcggtctttgatcttttctggcagttttatcggatttaatagcttcaggttctccagtatatccgtcatggctcctcggcacacgtacaatgtccccttcttgataaggcttttcaacaaagaaagagaccatctttttctatcctttctcgttatacccttctaaattgtaaacgtagttgctaaacttatgaacccagcagctcctataattgtagatataatgtaagtccaattaagtaaatccataagtcttctcccctaagaaaaattcagatccctctaattaaattcgtattttaaggagacaagactacggcactctcttgtcccctcaattttttgtactaatttctccaaaaatttaattgctctgctacttccaaaataccttcaattcttcttttctttttatcaatcattgttgctataaacttatcaaaagattcagccggataatgtggattttttctattagtgtaaagctgtgctgcaaatgtttgtgcgagagatgtaaaagcataacttttgttgttatatttattaatattcccatataaacatctcaattgttctatatgctcattcaaagttaacgatgaaagatcgtgatacgtactatgaactcgttttttgaccatttcctctatttcatggctgtttgcctcttcaacagacgtgtttcttcttacataaattctgtttactttgattcctgttgtttctttctttgctaagaatggaatgtatctcaattgctttggaatgtatacaaccaaaaaagcttttcctttcaaatcaccgtaaacatcttcgtcggagtattttaaaagttgagaaaaaaacttaagctcatcaggtacataattcctcaatttcttctcaaaaactgttttatcaaagttgtcatctaattgtagcccaactggcttatattctttatcttcaataccaaaaacaatcattcctccacctgaattcgccattgcaaggagaagctttgctaatttaaattcttcaattatcttctccttataatcaagaaaatttgtctccccgtataaggaattgacaaactctttaaatgaacccacatcaaatttttcgttttttattacatcaaaaaaatcttggtagcctatttgctttatttcatccattgaatatatacctactttactttaaagtctaagttcacttaaaaattcattagttaatatcaagcagttgctcttttttcttcgcgaactcttcttcggttattattccttgatccctaagctcagcaaattgtctaatttgttcagggatatttgagcttgaaaaagacacatcattcatattttgatttgactgctctgctatcttttcttgaagataggtgaacatttcgtcaatgcttccttcatcaattgttgaaactgaaatttctttcccggcataatcaaagattagtttataacccgttagcccacttttaacttttacaagatcaatcagattataatcaaattccacaatctcgtactttgcatatttatcaccataatgcaataacctatctggcattgcaaaaagaacgccggcatttcccatgaaaccatttagattccctctaacgaaagtcactatttgatcttgatttattcgattggctgcatgactaaatattttttgaagatctttcgatggttttttatattttttgctcaaggaactatagacttcctgaatagggtttgggaatgaagtagcttgaactcttgcctgatctgaagatattgttttatttttagaccttttagaattcacggtattactataagaaatacccgtacctggaattcctacagtggttgtggttctacctttagtgtttgttgatatacgtgcccctttaacaccggcactgatgccgacactttttgagttaatgttcagtttaactcctggagcaattttgacactttttctaaatttaaaccccattgtatacccctcacttttggttagttaatttttcctatgccttactctatcatcatttgattattttttccatctgctatctccttatatctggttaaagtctcttccattcaacatactcaaatcgatgctgataaaggtcttccaggattgcggcccattcactccagtacacctggacactcctcacctagtaataacttcaatttgtcttatggcagaagtggctttaaactctgtatgtagcccgtttgagatcactaaagcttctgacattgtagtaaacttagaagcgccatgacccccttagatactatataaccactgccttttaatttaaatgacttgaagtaatagtaattattattttcaaattaaataataaaaaggtatcgataaccggcatagctaactcctcttcagcagaccagcaatttttatggccagtggcagcaacccaattaatatgtaaaacaccatgatatttattttattcttaaagaacagttcaatcatattttgctccatacctggtggaaatgaatcaatcagttcctgcttaaactcttcatcataaacctgatcaacaaataaggccttaaatcccgttagaaagccaacaccaagccagagtattaagaaatatgctattccaatcaaattaaagccctccttatatacatcgtctggtattatagtagtgttaaatactttgtgtaggtgaaataaatgaaagagaaagattttgagactaatggctacgatgtaacagttgtatatgattataaggagtaccccgatgttaaatatggacgctgcgacaattgcaattatactttgttcaaaagctctgtaaaaagcggtatattcttgcgtgaatgtcggcgatgtggtatgaaaaagagcatttagtttaatgctcttttcagtaaaactctgtgtctatttcataaattttaatagtaggaacaactgcttcaccatcaaaagtttcgatagtctcctttccaatcgcagttgctttaacaccaacaagaacagatcttttttcagaagtgcctgcttcaatttgtttttttaattcccaggttatactcccaacatcacttttcacagtttttttcccgatataacattttataatgtctttgtttgcatctcttaaaagaaaataagggttagccaatttaagatgtctccactctgacatccatagataacctaacaaataaaaagcatgaccaagttttttattttcaatatcattacttaattttcctcgatcctgtatcaagtaaagaacacactgatcttgcaattctccatatatctttctttgaatctccttatcatatgcagcaagttcttttttcaaagtaaagaaagatctcacactaataagcttttgaatatatggtttagtaatttcctttattgatttatttacagttacagtggcgcgattggaaatttctgtattataagacccgctattattaaaataggtttgctcttcttctagtggcacaacccactttacctcattgtattttgtccttttttcatttacttcaaatacatccacatattcatcaggaattagataactacaaccatttatatggttgtttggcttaccgtttggtagtctccgcaaaaagaaatatggtttagggttcttaccacaccccttattatgacttaatttagcgttgcaatttgtatttggacaataaaaaacttggcttctatccttcattatttttgtaacatctcttgcataaatcgattttaaagttccatttacctctatatgtgctttttgaattgatcttcctctccccattgtagttacttacctccattaaattttcttttaattacgaatgaggatgggaaaagtttcaaacttctttataaaacacttcttttattaaattttattttttcccctctctaaagccatataacatttccctaaggactttccctgttataatttggctctttttaacctcgttgtctgttgagtagtaggcatcttccttatctttaaatttagacaggaattgattttgattgacttgaacataatcagcaaaatcttctttttctgcttcagaattgaatactaagattacttcaaagaaattccttcgtgctattattccctcataattttcttcattaagtaaaaggtcattcaatttataatcgttttcattatgaatataatatctaaaactaaacttttcatttatatcaaaaacaataaaaccccatttaggagtgactactctaaaacgaccagcatccaaaattgctgtattgtatccctctaatatagttccattaaattttaatttaatcttttgataacttgtgtgctcattatccatacagtatgaataaaatgcaggatctccactttcatagtcgccatattccaatgaatattcgggattatagaggtgataaaaacccacttcattttcaacccaatcattcgagttatttagcagaaatgatactctttcaattactgtcttgttcaagccaaacctctttttccataaagactctatagtagagaaacttgccccttgatcaattggtgtatttgtatcaccaaatctgctgtaaacaatgccttgtttaatttttttataactttttccccttttggagagaataaatggaactgaataagaatttaatataattaatatgtccaatgcttttccttctatctcaatatgttcaagtttaatgtttggggtttccccggaaaaaggaaagctgttaaccatattgatcaaatcagcttgtttttttctttcgtgctcaccaagaccaactacttcaccatcatctttaacaccgactataataaaacagtctcgatcatgaacagtattagagaagcataaaatatcgtgaattaaaagttcattaaaagaatgccacttttctttgaagtcccaaaagtcaccttctctctttaatctgattaaatctttaactagtctaattaggttataattcattttacttatgactctccccaaaatcgtagttttatatggattgaaagactattgaaaataacgtttaatgattatattcttcaacccccgcagaagataatacaacagagtaagttgaattaccgatcattatattgtcaactctttttattgctttagaataaagtttagaaaggttttgagggaattgataataaagtggttgtttggctatttcactccctataaaatttactgtttcatctgtaagcaagtcctcttgatccggattgttggagtgcatctttatagccgcctctctttcgactccaatgtagtcatcatctgaagaaaaagagtataatttcggctgattttgatttatatatccgaggaaaaacaccgaaattgggggtatgtcaggataacttgtttcaaaaaatgtttttccattcttaaatgcctctttgaaaaatattagaggatcaatataattgtttattccatctattttcgcatcaatgtattcaaatgctttttttgctatatctgctcttccagcaaaagaaacaatgtacttatcctttataatcttaatcttcctgtaatcatcagaaactacctcaaatccttgaccaaaaccgttagatttggttactcttttatcagcagtcataattatgctattatctgaaattactgttatcaccatcgtcattcattcatcatgccctttccataacaaactttattgaatccttggaacacaatgtcctagatgtcttatatctggttaaaagtacgattttatgtggactcagaaaatttgaaagtatttactgttcttgtaactttagtataccatgatcactttaagtgatcaatatcttttttgtaaatcaacagctcatgcaattcaatgtctaaatatgtacagactttatccaacagatcccttgggtatcgctccatttcgtcatgatacagcttcctgactgtgttaaaaccatgattaatatcattggacagctttcgaatactgatattcctttcgtctaatattggctttaaatttgatttaatcaatattactacctcgcattcattatgtatgatcactttaaattatcattatatccataaaaaaggtcaaggatataccttgacaatgtattaagcttaccaatcaaatgaatcttcatgttcaaacccataaatacctttaatccacacatctccgcagcctggattttttgtaatctctaacatatgattacgattagcatctccctctactcgatctgtagcagtatagtcggcatagttccctacaaactgtttctcactacgtggaaatacccagccagcaagagttatcctactgattttcatatttagagtacacccttctgcattgctaattgtgaatttgtagaagaaccaagtgcgatcataattccgatcaaaataatctgccattgaaaaactctctgaatcctcactcatgtgaaaattcacatttttgtagtctaatgtaagcttcgcctcagcacttggtgtgttaaaactcaatataaaaccaatgcaatgcaaatcacaaccaaaaagattagctttttcattccctctcccccttttccaaattatactatatttgaaataaaggtgaaagaacaggcagaagcttcgtgatttatctgtattcttcatgatatagctagatatacatgtatctatgaatatctacgtgtatttataagtatctacacctccctatatcacacaaatacatcttattgagaacaaaaatatttattttagttcattttcaagaacaaatcttccatttttatgatataatcatcactgcttataggtaaccttactgcttattcgacatatggtataggaaagaggttcttttaatgaatgtaaaacactctaattgtttctttcttgtcaggctttttgctgctctttgtgtgttgattggtcatgctacaagagatctaaacatttctgtctttggctatactccagggagtaaagcaatatttcacaccggcatatcgatcttcttttttctaagcgcattttttcttttcacttcttatgagagatacaagcttaaaggaaataatgtaacggatttttattggagccgaattatcaggatcgcacccgcaatttacacctatactattgcctcaccatcctgttaattgttctaggagctctttcattaacagtattcactactaaagagtactggtcatggcttcttagcaattttgtgttataccctcaatacttccctgacatattccatcacattggcacaggtcgccttaacgattcactttggacaattcctgttcagattagcttttacctggtgttacccgcaatttattggttttataaatgcttcggattcaaaaaaatgattctttgttcttttgctgtttccgcttttagtgtgctgatttctttcgtggctttgaagttcttgccaggtaatgtaatcggcagcctatacttacattcttttttgccgcagatgttttatttcaccttgggcatcttctgggcaaaggcatggagtaagtcaccgcggcatattgttttattcttatcttcaataattttatttttattctttaaatttgaccttctacatctctacatctcagctcaataaacagcacattatggaacttttcatggttcgtccccctaagctatgcaatcgtctggttcggttacaatgggccgaagatattgtggcagctgaaccggttagatgatatcagtatggggattttcatatggcacatggtgatcatcaacatcttcttatacactggaattaataaaacattgtctgattacccgctgatcatagccctaattgctgttactgctgcatccgcatttctttcgtacagaatagtggaaaaacccgctcttaaattacgtaatatcaagaaaaacaaaccagtcaaagcaaggattgcgagctaactgcaagggctgttcttatgtaggcagcccgattcccgttgatgttttgttcaccaattccaatctccagttggcttatacataagctcaatatcaatataggttttataattacccttaggaaatttaaccagaacaatctcaccctttttaggaacaaaatctacatcgttcctccaaaatttaattgttttagctacttccttagtaattggtgttgtgtgataaccatagctttcggcttgactactagagatcacgttgcctctataaacatattcgtcttgtccattacgtgattgaatttccctggttgttaaatcatatgcgtaaatgtcatattccttattctcttctcggcttaaatatttgtcattaagcgcttcactttcttgacttgaatcattgtcataataactttttctttcattttcatcatcgtgattttcctctaattgagtatccacataaacttctgtattgttgttaaatttactacactgaactataagaaataccccgataatacccaaacataaaattattaactttttcatcacttctcctttagtttcttcgtcatccctcatgctgttgtacatattttaaagtaacttaaatgatttttttatcgatacaatgcatatcgaatccttgttttataattcttgcctttccatttgctgcagaccaactttcacttatcttttcaataaaagaaaaaagtttgtgctctaattttccgggcgtaatcttcataacattgcgaaagatttttctatagcgaaaactttcttcaaactcaatcataaattcatttaattgcttattccaagtgtccaacttttgatcgttgagactgtaggaagatcgtttaaatgagtaaggcggatctatagaatagagtgctacgggcatacctttgtaaaggatttctgaatagtatcgagtatttttaactccccagctaaggtcattctcctcaaaatacttattaatctgtgattctaattctttaaatcttaagtatgatttatataaggaaggattctttcttgctctagttacttgagcataaattgttggagctcctgttatcttggcccaaattgtacggtgtgttccatcaccgtaaacagcataaaagtcgtcatcttcataatgaatcaatttcactggtgagtgttgataataagtgtggaattcttctaggctttgttttttcaagtattcaaaagctttttcacatcggccgatgtcaatattatctgtaccgttataacatgcgtgatcaaaccaagacacaccactggttcccctgaaccctaaacccttaattttttttaacggaacatcccgatatagtttttcgctctttccgactttatcataatacaattcatatggatactcacttatatttgcggtttccttcatttccttaatatgaaattcaaatacacccttttcaagaagcaatttttcaagtttatttttcaaatctctccccccaagcagtcggacgtctaaatgtcattggcaactcaagcctataggtgaattttacattttttctttgcgatgataaagaatcgttttgaaaatctaattaaactgctgttttatcttaatttaaagccattaaaatgtgatgatcaacgatccaacaagtttccccctcaaaacttttgccatcacagcttgaaattatcggtctgtctccgaaagctttggcatacgcaatcacataatattcagcagtgatatctatcttagggagaccaccgcctaaatagctcggggagtttatctcctctttttttcatttttaattaatgattattgatcatgcaaataggatctggatatatcgggagcccaatgcttgagaagtcagaatctaaccatgaagtgatcccttctcctcctgagacatggacgattaaatattctttctataagttcagcttttcaaatgatcaggaatgccacgtatcaatcaatggtggcgatcctatcaatttaagagctggacaaggctttcaaatggaagctcatgaatcacctatcacaagcttcaagatttctgagtcaggaataacatataactttttgggggcgcgcataaatgagtttcttcaatccgattgttaatgtctcaattgtcactgggaagtctgcttatgatattgcagtggacaatggtttttcaggaactgtagaggaatggttagcttcattaaaaggtgaaaaaggcgatactggagctacaggtgcaaccggggttaaaggagctactggtgctgctggtaaagatggaaaatcagcatatgaattagccgttcaacaaggtttctcaggaacattagatgaatggcttgccttactaaaagcaacagcaaactgatcacgtacccttctctaacgaggagggtatttttttcgttttttcaaattagaaaatcccaaaatctctacatccttttacaattttttcaatgactatgttatgattatccccaaaggatttttgaaattttcagaaagaggggtttggatgagcaagatcgcttcagaagttgttgctactacactgaatgattggtacattgctataaagaaacaaaaggtacatgagtcaataaaatattactcagagattaaaagcctgttcgatgatatggaagaggatcaagaagttcttgcatattacagtttattagaagaaagacacaaaatgttgctacactcttcacgcggagagcctttacaaaagcacacttatttcactgaagagaatgaaaatttcataaaaagaacgaacgataaattggaatataacttttatttattcgaagcaatgtacgaggcatacaacaaaaattatgatcgagcaattaacttatatggattagcggagaaaaagcttgcagaaattccggatgaaattgaagcagctgaattctactccaaggtctcctacttatacactcttgttaaacaaagcattgtggcacaacactacatcaagaatgcaattgcaatatataagcgacaccctgattataaatgcaaactggcaacttcaacaatgattgcggctgcaaactattccgatatgaaacggtttgaagagtcagaaacatattatttagaagcaatagacattgcacaagaaacaaaggatgaatatttggaagctcagttatatcacaaccttagtatcgtgtattctgattgggacaaacctgataagtgcattaaatctctcgaaaaagctattggaaatgaatcttggatgaattcaaattattatataaattctttattcatgatgattaaggaactatttaaaattgacgaaaaaatgaaagccattaatttttacaataaagcacaggaaagactcatattaatggagaataagatatacgaagccaaaattagcatcctatacaacctatattgtggtgaattaaaaaacaacttcaataattgcatccgttatattgagtttttaaaacaacaaaatgaccttgaaagtgtagatgaattgtcctacatagctgcaaaaaggtttgaatcaataggtgcttttgaagaagcaacaagctttttcaatgaaaaaatttgggctgaacagaaaatgaatcaggtggagggaatcttatgaaaaaaattgtgctttgcgtatctattttaactgtaattttaagtggggtagctttaacgcaattgagtacagattcaccatctaacatccaggtagctgaaaggccagtcggaggttaaaaattaatttagccctactcatatgagtgggctttttattttatgatttgtgatcacctgtcaaacctgctctatgcaaagctgtgcctccaggtgtataagaaacagctcgtaagatcgcttttagatccgtatttatttcttatccagtccataacaaaattatggaagcatgggctggaaaagggtaaggaattatcagaacaactggagtaagcgattcaaaagcataagggcgcagatatctatgataaggtaaaggctcagacatatgctagtagtaaaacaggtaagccttattcagtagctgcaaccaaaaaagcacaaataaatagtattgctctaaacttgtgtggcaagcatacaaaaacacaaaaggaacagacctaaacagtaatggagaagcacttgtcacatctggatattgaccgctcatcaaaaactgtctgctcctaatcatttaatttacttgcagatttattctgcaagtgtctttttattttatataaaagataaggagcgttatatgaaaaagtcttatgttttatatgggatttcaggagttctaattggtgcaatagttatattgttgatcaatgcattctttataaataaaggtgaacactctgtaagtacttctaaaattaatccaaccgaggataaaatcttttttatctattcaaatccactcatcaagaaaagcgtactcatatccacatcccaaggagaaaaattcaataaacgatactttaaggtaccggatatacccatatatccaaaaaaaaccttcttcagacgatatcgtcttgttagctgaacatgaaccatattattacacattaaataacaacaccattaaggaacatcaattgtccaatccatttgctttttggtatcaaggagaggatgttatcgtaaaagcctataatgtcgacaccaatggaaatgaactgaaagtaaatgataaaaagttcaataaaaaatatagcctgactttgcctaccctcgtaaccatgggaggaagcgataagaggtatatttacatcattcaaggaatgtctatgtacgtcattgatagaaaaaaagaagaaattataaaaacgattggattagcttcctatggagatgtatttgatcactctgaaaaatatgttgtggctagctcagaaaatgaactaactgtaatcgaaaaaggatcctggaaatcaaaattcataaaatatcctgatgatcttgaacaagcggacactgtatattacgacaaaaaaagcaacaaattttacgttacatatattaacaaatcccgatacacctgcttacttgagtacggtcaagatttttcttttgaaaaattcgatttacaatttccatatatgaatgcaaagtttaaagatcaaaaactttatgtgatttcacaagaggaaaacaaaaaaggcattggtggctatatggggatttttgatatccgtactaaaaagaaacttaatgaatttgatttgcctgaagaagaaacaaaagtgcaggactttatggttttagattaaacataaagaataggtgcaaagcaaaaagccccttcctgtacgataaggggctttgattttaaattaaatagatgttttatacgcgttaattgcttgatttctcaaaagcatattatctttcgtaaccattccgagattgtatgcttgtttgatgatatccagcacttgattatcagtttcagttacagctcgtcccccagttattctggacttccagtaatcaaactggtgatttaactctgaactgcttttaaggtttttattatcaactactttgccattctccagcgcttctttgaattcagtaaaaccaattgaacattgctgattcgaactaattcctgcgccttctgtcgctaaactgcaaaacgctaaaaacttcggatctttcgtgatattgtaagagttatttagaccttccataacattcaccctctctcgaattttacaacgttgctataaatgattttcatgtttttcccaagaccttcaacttgaatctcatttgaaggaagttcgttcattggaatttctatcacaactttgttttgtccaagtatagggtcatatttgtatatgttcgcttcacctttgtataacaaatttctcccatccactgctttaatgacggttgaatttgtatagcccataaagcgaaccttaatatgcagcttgtcacctttcaaaacatttgttgcatttggtttgctgcttgtaatggattcccaagcaaatttgttgccatctgatgtgacggaaagaatctaaagactgtaaagcggtactgcttcaactgcttttgctctcgatgtgtgaatggaaaacatcgttgtaacagcaagaagtgtaattgttactaaactaagtacatttttcaattctttaaccccattggtattattccacatgttatttatcggtaattccagcgagatatttaacttaaatacaaaaaaagaacctgattctaacatggttcttttcgttttagtaactgaatgggtttttaacgacatataaatgattcctgtacattaagtatgcttacttaagggagtcttgctcccccctatagaaagggggtgatgcttatgtcaacatttcaggcattaatgttaatgcttgcattcgggtcgtttataatcgccctgttgacgtatataaataaaaatagacctcccttaagcctcagaacctgaagggatgggtctactaagaaaccgcatcgagtaagccttttgacggggtgtgatcaacaccatactcttttattttatgcatttcttattaaagaaatacactataaccagtttatattttacagtttgattataacagattaaacgaaaccattggaattatttacaaaaaatttatttattggataaaaccattttttatagatcacacaagtgtaatacttttgcttaagcgtcccagtcttcatcctcaatccagtcgtctttcgcttcttctagttcctctattaaaaactctaggaatgtgctactaacttgtttaccatatccctcttggttatcccaaagaatgacggggcattcaccatttttcatcttgttagtatcaagacaataagaaaattcatctacatattcgataactacgagaccatcagaaaggttataatactttttatattcattggtctgttcgacaacttcagcaccgtgagagtcataaccgagtatcatagtcccgtatgctccccctgaaccatactcagttaaaaaccatttatagctgtctggaagagttacattgagatgctcttctatttctctaatctggtcttcagtgactccccccgtgagaattgaattttctttattttcatcaaagaaagtttttattttcgaataatccattaaactttcacctcttattcttggttctcaaattgctgagctctccatctccaataccttcttctgaaacttttatattgtttatcaagtactggatcatttctaaaactctgtccattcccttttaatccatgcaaaacatcactgtacttattatgccagctttcaggtatctccagcatagtaccaggctcttcttggatcaaatgatgcaaattaatttgggttccatcttttgcataaggagcattaccatttttcattagttgaagattcgtaaggcctttacgatttttttgattaagatcaatatctttcattgtatataccctacggcttacatctctaattttcccttttgtttttactttgccatctatttcataggcctcatacttctctttatttaaccaagggacttttactttctgaccagtaaatggctttctcgttccatccgggattttctttgcattggtcaaaagttcatttttaaggttttggctgtcaaccacattgtatggtacgttatcggccaaggcaagatcatacttagagttataaggaagcaaatctgcaatcttaacatctttaattttcttccctgcctgtcctgccttgtttatgaccttccccgccgcatcagctttgttaacggctcccgcgcctttcgttccgacgacagccacagctgctgaaccgaccgcatatgtcacccatcttgatctggaatacgcatctccatttaccatatctttttgatacgattcctcaatagctgttgaaatggcattatacgtgttaattggatgagcaactgcccctatgataccttcaacaacttcatcaggcttgctgatcagctgccataaacctgttaccgtgtctttcccgacatcataaagaccgacgccggctccttttaaaatatcccaagttacttctccggcttcttccagctgttttgcttgttcaagctgcgtcacatactgttgctgggaaggttcaaggttttcatagccgatcttcttagcaatctccaagtattcatcaggatcagttactccatcagcgagctttttcttaagatccttgattttccgctctttcgcttcttcctttttaattgtcaggtaagcgtctgaatgtcttgcaatctcgccttttttcttatgtatgtcactttctctgtacgccttggcgttatagtgaagcggagtggcgttttttccttggcctgttgcattttggagctgctgaaagtcggcctggatgaactgttcgttcgcttctgtttcggcgtattctttcgttagatcgtgatcaagcttgccgagtttatgtatggtatcgtcccgttttttgtctgctgattccagcttttgatcgacaccctctgttgaaaaaacctgcatagggacaatatcgcttatctcgttaagaatatccctcatttcattccgctgctcttgcatgatggcttttgatttattcttcgcatgaatcaactcatgttctaaaaatgactcttccacaaacgaatcggctaatcccgcatcagatacttttccagaaatactgttaagaaacgcaatcttcatatctattagatcaagccagctgtcagtaacacctgcatgatcttggaagaatgctttgatgttatcagcacctttacctgaaaactcactgtcatctaagtcagccattccctgaaaagcttttctgagattgataaattgttctctaatctgatcatattcttttgctcgcttttccgctgctgagattaacgaggatgcttcaaataccttcatatctgtctccttcccacttatttcatctaaattttaccatagctttattatttgattaacagaaaaagacagtccgttccgactgtcatacacagttttatctcgtcctgtaataattttcagctgtatagtatttccagtcccaaaaagcatccccgttcgacataatatatcggtctaaaaatatttcaaagtttaaatttaatggattatattctgaaccactttcaaatataaatagataattaggatcaccttgattcactctatccttgtcgatcattaaatgacattcttccaacaggtagccaacaggtattccattgataccttcaaacaaaagctcgtattttagttcttcttctatttcttcaaggctaaatagatgaagtcctcttccaatattctcaccctctgaaagaatttcgaaaattttcgcaccattatgctgagaaataaacttcaggtaatcatcaggaagagtgaatttatgattcgactgaaagttttggatttcactaagagacgctttgtttggagaaaaagtcacaaggctctctataatatatccctcagaacaaaacaatttaatagcccctttttcatctaaaagacttttcaaaccattgatagtcttatggacaaagttagtcaataaaaacacccccatactcctcagaataattactgaggatacgaatttgttaatcagtaacaattttattcataattgaagcagcacttgtggtgaacaaaatgtaagtgttatttgctgttttaattactatcctatccgtagagccagaaggaaactctatcctaactctatccttactgcgcttttctcccctcccccatagttaggctcaagaaatacatcgttatttgattggaaatggatttttaattttgaaataaattgttaagtaagaatgtagtgttaatcttgatgacgaaaaagggaattcgtccgtgaaattaaaaataattatgaccaaagatatctttatcgttgattttcaaaattagctctagtattcttcatatattctctgataattggtgattccattctttgtaaccctcccatatgtcgaggaagaactaagctttttgcaaatctagaatcagtaatccacggaagattaatttttttggtaactctattgtgtgagagacttattatttggttattatcctctgatgaatggtaaaatttaacttctttatctagttcattaattttggaagtattcctatttttattatgaatttttctaatatagtcttcttttattctctgattaaagaaagtattattataagaatttaaatagaacagctcatttaaataatctatttctcgggctctttttaatgttagaataccattttcttcccctggaatatcatatgctacactatcgtaaaagagtaaacagtgctggggagatattgggaggaacaactgtagccctctagtaacaaggccaaagccccttccataataattccttccaatataaaatgagttgtaacgaactaatggattatctgatgttatgaactgtcttgatgttttctgtaatatcaagataggttccaaatcataaattagcggggaactttctaaagcaatacctataatattattagcaggttgatttatcttgatttcaaattgttctaaatctacttctttaaaattagggtgtcccttaatcattgttttaatcagtttatcagctgcattttctgctgagtcagcactccttaaatttcttccctcactaactaataaaaaagtaagtagatgttcataatcttctatttcattaacaaagtgtatgatactgttcgtgtctataattttctttaaaattctcgcggcttttctttcaatctctttatctaaaaaatcctcaactactttgtcgtcaccgtagaaattgtttctttggcacatatctttaatcgaagcattttgaatgtataatgaattcatgatattaaatgtgctaattgatttgtcagtttcagaaaaattctcaaataaaatttcggaacatagtgctgtctatttttttgtcccatacttgctcctcccatatccctttactggacaattttactccacctattatttgaattttaattacccttttattgaataacaaacctctaatatatccgaaggtacaaacacttaattaagttccatttgattttccgactttaaaaacccaataatactttcttcaacttcattcccccttttagaatgtttgttctctaattatatcggtaaaccatcaataattataatcctgtatctaattattgtttctaaatttaattttcccaaaatataatcacatctctgtttaagttttgttggggtatgttaaaactttactgggttcagaattcactttgagcttatcattggcagcctgcagctcaaatgattctgaaaaagtaagcacagaaaaagaaacgtcacaagcgtctacggatgtagaaaagaaaacagaacaaaaggaagctgctaaagaaaaaactgctgacaaatctaagaaaaaagacaaaaaagaattggtcgatgttaaattagatagagcagttgatggttacacaattaaagttaactacaacggaaatgtagacacagtctgctacttgcttattgatacacctgagacgaagaaaccaaattcttgtgttcagccacatggtgaggattcatctaagcgaaataaagaattggtcaatagcggtaagctacagcttgaatttgataaaggtgaccgcagagataagtatggaagactgttagcttacgtttatgcagatggcaaatcagtacaagaaacactgcttaaagaaggattagcacgagtagcttatgtatatgagccaaacacgaagtatttagacacgtataagaaagatgagcaagctgcgaaagataaagacttgaagatttggagtaagaatggatatgcgactgataaaggatttaatggctgcgtaacgaaaccgaagaaatcagtaagtgtatctaagccggctcaaaagtcagttgcaacacaccaatccgagacacataaatcgaactcaagcggttcagcatcaagcagctcttctaactctgcacaagcctccccttctgctggaggaacagaacactttgcaaactgcacagagctgagaaagaaatatccgcatggagtaccaagcactcaccctgcttatacatctaagatggatcgggataatgacaactttgcatgtgagaagaattaattattttgaagtcctctgaggcttctttttttatttggatacattcaaaaccactgagcgtgtgagggactctgtggcctatagtggctgattaaacccctatgatacatcaattaggattttatcaaaacttttcttttaaagataacatcatctctgtctcaaataatacctgaagcagttcatctatattaatttcgttctgcttgtaattattcttttcataagtacgaataatttcttcatattctgatcgattatctcctttaatggagctaattccaagctcttcaccgtatcggttaatgaatagttgtttattcatttctttcgctttatcattttcataattacaaaatgcacctgacaactggacgagaaaagtttcatctttagaatttaagttattttcgttacaccagtctacaaaacgatttccagtcatgttatcacctttaattttagtatttaaagaacaagataatctgcagcaaggatgatatattctactgccatgccaattgtttcagcaactcctgcgccaactgcacctttaatagctggcgggatttgttttcttgccatagcagcaacctctttaggagctccggttatatcttcgagaaccttacaaattttgtttgtgtttttaataatcttgtttaccgtggactttccaaacattgtacctaaaatgtcttttgcccaagcattattcgctagtcctctaataaccttaatcgcttctttagctgcggcgcttttagctcccatagtactcatttgatcttgtgagttaccattttcgagaccttttaattcttcagcagcatttaaaatgcctttttctttaactggtgggactgagtattctttagctagtttttgaagctcggtaggattataagtaaattgcacgtcctgtttagaaacacttgctttttgcacttctgaggccgaagctccaacagtagggatggctataacggctgcaagcaccatcaaaagaattttatttaaactctcctttatccctaattttattgttcaacacattgaccacaataccataaaatactaatattttttcctgtttttataatattagtttaaaaaaggcaaggaagtcctgcatttgaaactgttcagaaatcactacggtgatcaaatattcattcacaatttaagatatttttactacataaaaaagactgttctcaaaaacagtcttagatgtttttagaattaacgtatccgttaatttccttaattcttattctgatttttaaacgccaagtgctcaattccttgatccttaaaaacttgacggatgtagggaggtgaataaccatatttccggccaatttcttttagactcatttttttgttgaaatgcagatcgtataacagatcaaagtcctttgctctcctcctctttgacaattcaggataagaaagcttgtccacttttttcgccttaaaaaaagattcagaataccccagtctggaatattaagctcctttgatatttcccccatcgttttaagttctttgtttatggataaaaccattattttatttagtgttcaagttatagttgctcataagcgctgccatatgaggattaaatgaacaaaataaaaaccctgttaattacagtcggcgtttaattaaaaaatgaatacgattagaatagatcaatattcaaacaatacaatccttacaatatattacgttattttcgtgttcaatgtcagacagaatattgtacgaatactactgtttttacagtaaatacaataaagaggaggtgctgtttttttggagttaaaaaacatcgttcattcttacaacattacaaatattttgggttatcttagacgctctcgtcaggatatggagcgagaaaaaagaacaggcgaagatactctaacagaacaaaaagaactcatgaataaaatactgaagtcgattgaaatcccctatgaattaaaaatggaaatcgggtctggggaaagcattgagggccgccctgtttttaaagaatgtcttaaagacctcgaggaaggcaagtaccaggcaattgctgttaaagaaataacaagactcagccgcgggagctacagtgatgcgggacaaattgttaaccttcttcaaagcaagcgattgattatcattacaccatataaagtttatgaccctcgaaaccctgcagacatgcgtcagattcgttttgaattgtttatggccagagaagaatttgaaatgaccagagagcgtatgacaggcgctaaatacacatatgcggcacaagggaaatggatttccggactagcgccttatggataccggttaaacaaaaaaacatccaaactagtcccagtcgaagaaaaagcaaaagtcgttcaattcatctttaacatctttttaaatgggttgaatggaaaagattatagttatacagcgattgcttctcacttaacaaaattacaaataccgactccatcaggaaaaaagcgctggaatcaatacacaattaaagcaattctgcaaaacgaagcgtatatcggaactgttaaatataaggttagggaaaaaacaaaagacggtaaacgaacaattagacctgaaaaggaacaaattgtagtatcggatgcacatgcccctataatagatcaagaacaatttcaacaatcacaagataaaattgcaaacaaagtccccctgctgcctaataaaaatgcattggaattaagtgaattggcaggcgtatgcacttgttctaagtgcggtgaaccattatctaaatacgaaactaggagaacgcgagaaaacaaaaacggcacggaaagtgtgtatcacgttaaatcactcacttgcaaaaagaataaatgcacttatgtaagatataacgatgttgaaaatgccattttggattacctctcttctttaagcaacttagataataagattttaacaaaacatatcacttcaatgatttctaaatacgaagacgtaaatagtaatgtgaaaacaaaaaagcaaatgtctgaacatctatcacaaaaagaacaagagttaaaaaacaaagagaattttatcttcgagaaatatgagagcggcatttacactgatgaactttttttgaaaagaaaagctgttttagatgaagaatttaaagaactccagattgccaagcatgagctcaatggaactcaagaagcgcaatcagaaatagacagtaatacagtcagaaacaacataaataggataattgatcaatatcacattgaatcaagcacagagaaaaagaacgcgctattaagaatgatcttcaaagaagttatcgttacgatgacacaaaaaagaaaagggccaattccggctcagtttgaaattatccctatcctaaggtttaatttttcgttatcgacctcaccgtcactgatagtccctcaaaatacagtaaatatcttaaaaaaccgataaagccgtttccccggtaaacacaatgggagctacgaagctgttgtccgaaaagctgtttcatcaggcgaatcatcatgttcaaaaccgcggtacggtgttttgttcggtccgcttcggcaatgtgctcggttcacgcggttctgttattcctattttatttgagcagttgatggcaggcggcccgctcaccattacggataaaaacatgacgaggttttttatgtcgattgatgatgccgcaacgctcaccctgcaatctgcggcgattacaaagggcggagaaacatttatttttaaaatggagtccctgaggcttgaagaactgcttcacggatttgaagaatatgcgttccggcacggactgcctcgccccgccgctattgaagtaggaaaacgccctggtgagaagcttcatgaagaactgacctctcctcatgagacggaatctttatatgaatggggcaatctttacgcgatattgcccgaccccgccaaacatccggaatttcggaaggtcaatctccccagatatcaatccgatcaggcgccgctcatcacaaaagacacaatcgtaaagattattgaacgattacatgaagaaaaaaaaacatagaaaaaaggcctgtctgataggcaggcctcattgctgagctctatttttcaaataaatgcaggcaggcttcatagccctcttccttcagcttgtctttcggaataaaccggagtgccgcagagttaatgcaataacggagcccgcttggccccggaccgtcattaaatacgtggcctaagtgggaatcagctgttttgcttctcacttccgtccggatcatcccgtggcttgtgtccagtttttcgtcaacctcttcttcctcaatcggttttgtaaaactgggccagccgcaatgagaatcgaatttatccagagaagtaaacaagggctttcccgatacgatatcaacatacagcccctcttctttgtgatcccagaattcattttgaaacggcggctccgttccgttattttgtgtgacttcatattgcatgcggtttaatgatttgattttttcttccttattaaaagccatcttatctgtccctccaatgctcatcaagaaagccttgacgtccggaacctacacggtagcgcccgtagtgatcaggatttttcttataaaagtgctgatgatagccttccgcttcataaaaaggctcagccttcaagatgtctgtcacgatcggctttttaaatatgccgctttcttcaagctgtttttttgaggcttcagcgatttgtttttgttcatcattatggtaatatatcgccgcccgatatgaacttccgcggtctgcaaactggccgcctgcatcagtcgggtcgatctgctgccaaaacagctcgacaagcttttcatacggataaatgtcaggttgaaatgtgatttgaacggcttctctgtgtccggtcgtttcactgcacacttcttcgtaagtcggattctcagtatgacctcctgtatagccggacaccaccttttcaatcccgggctgttcgtcaaacggcttcaccatgcaccaaaaacagccgcctgcaaatgtggcgatttcttttttttctgacatacgggtgccctcctttgttcatacgtggtattattatattatagcatgtataaacagaataaaaataattctgctttcaggggaagctaaacgaatgccacgctgactacatattggaggttcatgatttgaaagtaaggacacaaatgatgtatgatatggaagctttgcttcgaaaagtgtttaaacaaatcagaaatgaagttaatgaaattctagataaagagctgtccaggaacgaattcaccattttgcggattctcagtgaacaagggcctaaaaaagtaacggaattcgcccccattcttgaggtctccgcaagccatattaccgcagtgaccgacgctttagtagaaaaggaatggatcacccgcatccgttctaaagaggacaggcgaattatcagaatccatattacggaagccggggagaaaattgtcgatcatttcaaccagaaaaaaacagaatacttttttaaacggtttgactgctactctgatgaagagctcgcaacgttaatcaaactgttcagcaagctggacaaaaaacgctgacacgaaaaaacacaaatccctgaaaggatctgtgttttttttatgaaaacttattgtttcggatgataataggaaaattcaatttcatccgtgtcgagattgattttatccgcttttacatacatgccgttgtctaaaggcatttccgacagacggatctcgatgcttttatccccggaatgaacgtgcacaaatgacgggagttcataaaagctgtccatataattcaacacaaagctgatcggcaggcttaattcgcctaaggaaaacttcgtcactttcaacatcacatctccgttctcctgtacggacggttcaaatgtgacgaccgcgttaatggaggttgagaatgctttgattttacctgccacgtgcacatcgttattgatgtccactttgtagtcaagctgattcgatgccttctcttttaagtacgcattcacaaacctggcaagagattctttcgagctcgtgatatgaaagccgtactcactttttgtctgatcttgtattttcgcctgctctcccggcataaccaataatgtcacaattaccgctgcggcaatcacattgagtgcgagaagaacaaaaaacagcgatttccattttttcatcatttcaccctattctgctggtaacccttgtttttcaatgatgccgtacaatcgatcggcgatgagtgcatatccttttgcgttcggatgaaaatcatcatcctttgaaatccgtctgcttccgcttttttgactgaacaagtcttcaacattcaccgcagcggcgtggggatctttttccagctcttttgcggcgatcttgttccaatccgttacaaccccattaatttcttttaattcaggcagcgtaaacgtgaatggattatacatgctgacatacaccagctctgcgttttcattatatttgcggatttttgaaacgatcgccttgaatcgtttttcaaaaggtttctcttccttttggaacggctgaaccgtcagctgcatcatattctggcggagcaccttcattaagtcattgccgccgatggtaaaaaagatatagtcggcgctctttaatgatttctgaacttttttattatcaagcttttccagcaggtccgacgttttgtcaccctgcaccgcataatttttaatatctaccgttttcacatgtccctttttcttaagagactccgctgccctgccgacgtatcctgaaccgtcaggatctcctactccttcagtcaatgaatcaccgaccgcagctatgacaatatgatctttcgttttcggttcttcagcgtcagaaccggtgcgctggacagaacaagctgataaaagcaaggccagtccggcgatcaatgagaacattcgcagcttcaatctggttgctccttccccgtctactagtggaaagtgtaacatgttttttcagatttgaaaatgtctaatctgccagtttacttgagctcctcagccgctctgacatctgagaggatgtcatcatacggaactttctgcacgccgtcataatctttaagcaccttcccgtcaggtccgactaaataaaaagaggttttatgtatgacctggtcctctccctccggctttttgacgattgctttaaagctgttcagcgcaaaatcttcaatgtccttttggctgtaaccggtcagaaaatcccagttgcgaagcgaaagcggatatttggaagcaaatgctttcagctgtttcggcgtatccttttcaggatctacactgaacgacacaatccgcacgtccaggttctcagccttcagttttttttgcagttcggtcatgtgggccgtcatcggcggacagaccgtattacaatttgtaaacataaagtcggcaatccagacatgccccttcaggcttttcagtgacactgtttttccatcttggttttgatatgaaaacggttcaatctgatagttcagcgggtcttttatcgttttccccccgcaggcgcacaagagcagcaaacaaaagacggcagcgaagattttcatttttttcatttccattcccccccatggataaaacgcttacagcattcatcataaaaaaattcccgcaccctcccttatcaaaaggaaggcgctaaggaatatgcaccgttatgcgttatgttttaaaatctcttggttgaaaacggcctcgtaatctttccacttcatacggcgcttgacatattgtcggaatgaatacactgttctcacactttgtgaagcaaaaacctctctcaaataaagctcaaggtgctgatgaatttgaaaaaaataatgttcaccttccgtgacaaccggtatttctgtcacttttacctgaatcccgtcctgtcgtttgaactctaggcttttgagtaacaagatatcaatccttctttttcgattgttttctttttattatatacaatctgagaaagcgtgtctgtcattttgcgcgtcgttctaaaaaaagtcagattaacaggtggaacagatcctgatctttattcacctctacgtaatgaaatcctttttgattcatccgggcaatgagcgcgccgtaatcttcccgatgcttaagctcaatgccgaccaatgcggggccgctgcttttgttattttttttcgtgtattcaaaccgggtgatgtcatcatcaggcccaagcacttcatctaggtattcgcgaagcgctcccgccctttgcgggaaattaacgataaaataatgctgcagcccctcataaatcatggagcgctccttcatctcctgcattctgccgatgtcgttattccctccgctgaccatgcagatgacgtttttccctctaatctcttccttatacaaatcaagtgctgacacggacaatgcccccgccggctccgctacgatggcgcattgattatataattcgagaatcgtgctgcacacttttccttccgggacaagcacaacgtcatcgacgacggtttcgagcgtttgaaaggtttcggcgccgattttttttacagccgccccatcgacaaatttatcaattttctcaagttcaaccacttgtccggcttttttcgattcaaaataggaggctgcgcccttcggctctaccgctatgatttttgtatccggcgagatgtttttcatgtacgtgccgagcccggacaggagtcctcctccccctacgcttgcaaaaagaaaatgcggttcaacgtcaatgtcatttaaaatttcgatggcagccgttccctgtccggccatgacatcgggatcgtcaaacggatgaataaacgtgcggttttctttttcacagcattctgcagaactcttatacgcatcatcgaaagtgtcacccgtcaatatgatttcaacaaattcttttccgaacaattccacttgggatactttctgtctcggtgtggttgacggcataaaaatcttgccgtgaatgccgaggtgtttgcatgaaaacgcaaccccctgcgcatggtttcccgcacttgcgcatacaattccgttttcagtctgctcttttgagagctgcctcattttattataagcccctctgagcttaaatgatctgaccacctgcaggtcttcccttttcaaatagatgttgcagccatacctctcagaaagtctgtcattcctctgcaaaggcgtatgtatcacaacgtcctttacattttggtgcgcttttaaaatgtcttttacctggatgagagagtcttctttaagcaacggtttcatttacagagtcctttcttatttaaatccctatttaatatgccattataacatgaatattcaaataataagacaattattttaattttgtaaataaaattaaatgaaccgatacaagagaaaaagatattttcgatcgcacaaacgtgttatacttaaaccaattagaaccaaaaggagccaattcatgagtgtaattgaacaaactgatcctttttatcagctggccggcgaacatcacaccttttcagaagcgaaacgattggcctcgcaatttgccttatctgatttgccagtcttcataacgggtgaagtcggaaccggaaaaaaacaaatggccagagcgatccatcataaatcccgcagaaacagcgaactatttattaccgttcactgcagccaaagcgaagagcggctcgaatatgaactgttcggcgctgaaggcgcattaaacagggcccgccgcggaacattattcttatatgaaatcggagacatgccgctctcggtacaggcccgccttctttccgagctggatgccgggctttctgcccgcatcattgcaagcagcacggcggatcttggtgataccggcgcagaaaatacgttcagccaagatttattttacaggcttcacgtgttatgccttccgctccctgctttatctgaacgaaaaagcgatataccgcttcttctgcagcatatgctgacagccacggggcagcatgttcatatcgatccgtccgtttatccgctgtttgagcggcacacctttaacggcaacatcagagaacttcaaaatgcggcgtactatatggccgcggcagcatccggcagcacgatttatcccgatgatgtcccgctgtatatcaaaaacagccagaaagcgaaaacagctaagaaaaaagaaaaacggctgacattgatggagaaagaagagtttttgtttattttggaatcaattaaagacttaaatacaaaaggcgaatccgccagcagacggagcatatccgaattaagcgaaaacagcacaatgacattatcgccccagcaggtcagaaacaggcttgattacttagaaaagatgaactatgtgacaaaaggccgaggacgcgctggaacaaaaattacattagaagggttgagctttttgcagtcactgcaaaaacaaatcctttaaaaaggaggacatttgattgttcacaataaaagaagaaatcgcaaatgccgtcacacacggaatcggtgtattgctgtcgattccggcgcttatttttctcattatcttcgcggtgaaatacggctcgccgacagacatcgtcagcttttcaatcttcggcgcttcaatgctgctgctgtatctcagctcgactcttttgcacagcattcagcataaaaaaacgaaagacattcttgagattgtggatcattccgcgatatacgtattaatagccggaacatatacgccatttttattaggaccccttaaaggggcgctcggtctgacccttttaattattgtttggtcgcttgccatcggaggcatcgtgtttaaaatctttttcgtgaagcggtttatcattttttcaacgcttgtctatttaatgatgggctggctgatcatcgtcgccattaaaccgctgtacgcttcgctgtcaggccccggtttcggccttcttcttttcggcggcttattgtattccgccggcacaatattttatatttggagaaaggttccgtatcatcacgccatttggcacagttttgttttaggcggcagcgcctcgatgtttttctgtattttattttattgcgtcaaagtcccctttatctgaaataaaaaagcacagcctctctatagagactgtgctttttttatgcacggagccgtttctgaccggccggataataagcgggctttatatgtaattcaatgtcagccggtttcagccgtttcagtaatctgccccgcagcagccggtctgttcccgaagtgctgacaggcacaatcgggagatcgaaacgaagggccagttcctccggattgattttgccgtcttcggacagaatcagactttgccctttttgcagacggacttccgcctcctgaaacatggcatcccggctgtccccgtcacaaatgacacccatcagccgcagccaatttccgagaaacggcatccggaaagctttctcgccagcgataaaaccagctggctcttcaagatgtcccgcaagcagcagaagatcagccgggcgcaatctgggatgcacatacaatacggggccgtccggtatcggctgatcatgatgaatgccgattgccgatcccgacacgtcaatgcagcctctcataaagactttcggccgctcatacaccagcctcatctgtttttgaaaagaaagccgcgggtcaagctctttttgattgatatattcctgaatatttttcatgaacataaatacaacgtacatcacaaggcagccgtaacgaatcaattcttgtccccctgcttaaactcaattctttttctcgtatacaaagtactcataatcgtaagggtttttttcatcttttactccctgtttgcgggatgtcaattcccattcagcttcattaaattccggaaaaaaacggtctccttcaaagacatggtgaatttttgtcatgtagagtctgtccgcataaggaaagagcgcactgtacagctgggcgccgccgatcacaaagcattcttcatcggccgggatcagcttgagcacttcctcagccgagtcggcggtaatacagcccgggaataaagattcgtcccgtgaggttacaacgatgttacgccgattcggaagcgggcgtccgattgattcaaacgttttccgccccattacaatggtgtggcccgtcgtcacttttttgaaatatgcgagatcatcgggaaggtgccaaggcagatcgttatcttttccgatcagccggttttcatccatcgcaaaaataaacgaaatcatacgctgacagctccttttatgtgcggatgcgggtcataatcctcaatgataaagtcttcaaacgtaaaatcaaaaatagaatcaacatttcgcgcaaaccgcagtttcggcagcggacggacatcccttgtcagctgcagattcacctgctccacatggttttggtaaatgtggacgtctccgaatgtatgaacaaactcacccggttcaagtcccgtcacatgcgcgatcatcaatgttaaaagcgcataagacgcaatattaaacggcacgccgagaaagacatccgctgagcgctgataaagctgacacgacagttttccgtccgcgacataaaactgaaacaggcagtggcaaggcggaagcgccatatgatcaatttcgccgacattccaagcgctgacgattaaacgtctggaattcgggtttgtcttgatgtcatgaatcagccgggagatttgatcaatggtctcgccgtccgctccgcgccatgaacgccattgagaaccgtaaaccggtccgagttctccgttttcatctgcccattcgttccagatgcggactccgttttcctgaaggtagcggacattcgtatctccttttaaaaaccatagcagctcatgcgcgatggatttaaaatggagctttttcgtcgtaagcatcgggaaaccttcctgaaggttaaaccgcatttggtagccgaacgtgctgatcgtacccgttcccgtacggtctccttttttttctccgttttctaacacatgacggcacaaatctttatattgtttcatttttttcatccttttaaagtagtcttttagtagtgtaacacaataaaaaatcatttctgcaaaatttctcagaaatgatttttttatttcttctcgctattacacgctcatccagtcaggcggcgtattgcggtcccagtaaatgctgccgagctcatgatgtgactgaaatccgtcttcagcggtatggtaatgaaaattaaaccagtagccgtcttgcgggggatgatcccggcggacgtggaaccttaaaagatcttcacccgtcagcctgttatacacatgaaaaattttttcggtttttccggccgacggtttgctggaaataaccacatcctgatacgcttcatcatcttgaaacttggctaaatgtcctgtgatcacatcttcgattttcggcagaatttcacttctgtaatcatcttcaatgaccggagagattttgctgccgaattttaaaaatgattgattttcagcatcaccgagaagctgctgctgatacgattgaaacagtaattcaggctcccgccctgccttctcttctcccggcagggcgtgttcatcataaaaagcggtgtaatcattctgctcaagactgctcgactgtcctgaaggcttgtctgtcatcaaagcagccggaggagacacgagtccgaacgttacaatggtaaacagaaccacaagggtctttttcatccacaatttcatgacagattgttcccctctgttttattgtcctcttttcctttattttagcatagatgaaagcgcggcgtcatgtccggcagcgtattatcatgcaatatgggaaattggtaactgtgaccgagcggataaaccgcttacaataagaaggagaaaaaggaggggatgagatgattaacgctttatttgcgacagtatcacttctcacgctgctttattttgtcgttatggaaatcactgattaacgaaaaagaagcccatgatatcatgagcttacatggatgacaccgaagtggaaaagcgccgtctttcttttcagcaccttgaagccgtatcgttcaaaccgcgggcttttccaatggtctttaagcactacgcattttttcgccgcccggacggcttgcgtgatgcactcttcgttaaaaccctcttctgccagcgcgcggagcggtgcaatgccgtctgacgtttcaacaggttcgtgaaacatcgggtcaaaataaatgacatctaccgatgaatcaggaagctcccgcaaataatcggcgcagtcggcatgtttgacctgaatgcgtttcatggcggtttggagctgctccattccggtttcccacgtttgaagtcctgtttcaacaagcaatgagacaagcttgtttttctccaggccgatgacttgtccgctttttccgactgccaggcttgccaaaatcgcatcggatgccaggccgagcgtacaatctaaaaaggaatccccttcgcgtaatccggctgcttttaacaacggctcggcttcccctctcaaaaaccgctttgcgcggaacatcgctgtattcgggtgaaaaaagaacttctccccttgcttcgtgtaaagttcgaaccgttcctttccgatgactaaaagatcgctagccgctcgttccagcattttttcaatgggctgtttattgcggctgcagtaagtgtcacccagcttgacactgagcgactgcgctgtgtgtatcgtatattcgcttggtctgtaactcgttgtgatcatctttttctccaaaaagaaaatgcccggaattcgggcatttcagcagtgcgcatcgaaggcatccgtcagatttttcataatttcctccatgtcatgcccttcgatttcgtggcggggaataaaatgaacgacctctttcccttttaacagcgccattgaaggcgaggaaggttcctgccccgtaaaatattcacgcatttttgcagttgcgtctttatcttgaccggcaaatacggtaaccgtatgatcaggcgctttttcatgctgtaaaacagcctgagtcgcagccggacgggcaagacctgctgcacagccgcacacggagttgacaacgaccaatgtcgtgccctctgcctgttccataaagctttctacttcttcagcagtcgttaattcctgaaaacccgcacccgtcagctcacggcgcatcggcacgaccagctggcgcatatattcttcataagccattgacataaaaaagccccctctaaaatccttatatgaagtcaaggatactatagagggggccggaattcaattgttcaggcctctgttttatattttcatgattccgcccgtattggcgcttgttacgagtttggaataccgggccagatatcctgtttttactttcggctcgaagcctttccattcggccttgcgtttttcccattcttcttcaggcacttgtacgtccaaaatccgtttttctatgtcaacgatgacatggtcaccgttttctacgaatgcgagcgggccgccttcagccgcttcaggcgatacgtgcccgattgaaaggccccgggacgctcctgaaaaacggccgtctgtaataagcgccactttcgggccaagccccattccgacaatctgagacgtcggagcgagcatctccggcatgcccgggccgccctttggcccttcataacggataatgacaacatctccttcttttactttgcggtttataatgccttcaagcgcggcatcctgggaatcaaagacgacagcgggaccttcatgtcttgtaatcccgtcctgtacgccgcctgttttgataatggcgccgtccggagccagattcccaaacaggacggccaaaccgcctttttcggtaaacggattgtcaagcggatgaatcacgtcataatcctttacttcatgacccgcaattgtttctccgagtgtgcggcctgttacagtcagcgcgtcaagatgaagcgccccttcttttttcgctaattcattaagggccgccgagactccgcccgcttcgtgcagatcttcaatgaagacgtccgaggccggcgccaatttcgataagtgaggcactcgttcagccacttcgttaatgcgttctaaagagtactcaaccccagcttcattggcaagcgcaagcgtatgtagcactgtgttggttgagccgccgagagccatgtctaacgcaaatgcgttgtcaatcgctttttcggtgacgatatcgcgcggcttaatgtcttttttgatggtctccatcaattgggccgctgattttctcacaaactcttttctttccggtgaagttgcaagaattgttccgttgcccggaagcgccagaccgagcgcttcagacagacagttcatggagtttgccgtaaacatgcccgaacaagatccgcacgtcgggcagccgaactgttccagctcctgcaggtcgctttcaccgattttcccggcttgatatgcgccgacgccttcaaatactgaagaaagcgaaattttgcggccgtcgcttgtgcggccggctgccatcggccccccgctgacaaaaatggtcggaatattaatccgcatagccgccatcagcattcccggcgtaattttgtcgcagttcggaatgcagaccattccgtcaaaccagtgcgccgagacgaccgtttcaactgaatcggcaatgatttcgcggctcggcagcgaatatctcatgccgatatgccccattgcgattccgtcatctactccgatcgtgttaaattcaaaaggcacaccgcccgcttccctgattgcttcttttacgatttttccaaattcctgcaggtgaacatgcccgggaacgatatcgatgtatgaattacagaccgcgataaacggcttgccgaagtcctcttcttttacgccggcagcgcgaagaaggctgcggtgcggcgctctgtcaattccctgtgtgatcatgttgctgcgtaattctgccatggtgatccccctactgtttttagactgtgcactatttttaaaattttcagtttattctagggcgcgttctgcaaattttacagtgtctttgccctgtctcgcttttctattctttctgtatttcgataaaaaccctccaacaattaatattgtacttactatatagagttttgaatcatttttcaacaatattctaaataatttttataaaaagtgaattcaaataaaaaaggtgcatggcgcacctttttgttataactgttctttttttctgctttcagtcatctgtttccagactgaacctttcgcctcttctccgtgctcaatccgttcaatcgccattttgacttgcaggctgacttcgaattccggatcgtcttccgccgcttttaatgcttccagcgcgctttcattgccgacttcatataaaaacatggccgcgcgccagcgcacgagcttacttgagtcactgagcgattttatcatggccgggatggcgctctcatcgccgagatccgacagacagtcacccgccgtccttctgaccgtcaccgttttgtcttcaagcgctttgtataacagcggaagcacagacggcttttcgatcattcccaaataaacgacggcttgtcttctgatcgaagtcttcggatcatgcagcgccttttccaatactggtaaatcgtcttcatccggatccatttgctcaagatgggcatagcgctgtttccagtcttcatcatcaagcatgtccagtgtcactttataagctttccgctgcactgcaggtctggcctcacccttttgctgtgcggctgcttctgtcaggcgtttgagccgctcatcactgtaggcggcctgaagctcttctgtgacatcgtgtccgatttcggtaaaatctccgaagcgcacgccttgttctttccaagtccgctcaaatacaacatttgaagcttcggaacgcagctttaaaatggcttcttggaaacgttccggaaggccgaagcgctcttcacgttcgccgtccgtcaatttgacctgcatcgggattccgctgaacatttgtacgaaaactttcacttcaccgaacgattcctgttcagaacggctctctgactgctccgtatgttccattccgaaggcggaacggacctgaggcagaatttccttccagtcaaaacgtgcgtttctctccacagccaggaaatcggcaacgtgataaacgccctttactccttcaatgtttaaaatatcacgtacgacaaccggagcatcatctgcctgatcgggcttgtaattgttgcttttccctgccggaagctcttcagtcaaaatcactttcatcgtgttcggactcggcgtcggttctattgatttaatcttcatattggtcctcctatgcgcaatctgacacttattctaacatagtcggcacaagcgttctattgcaccgcttagcttttgcaaatgccggcctctttttggatacgggcggcgaactgtaaaagaaattgatgccgctcctctgctaaaccggcccccgcttttgtattcattaagcctttaagcttgattaatttatcctctatatgggccagcacacttgtttgagttccgtacatcggatgacccttcgccccggcaaacataaaagccctgccgatgcccgctgcgccgatcgcatcaagcatgtctgcatcctgaacaactttcccctccaatgaaagcggccgctttatcagcagttccctgtgtctgaatgacattctcgtgataatatccgtgatctcctgaatggagtcagccgcgatgttgaaagcagccagccgttctgtcacttcgcccgccgtcagcctttcgcttttttcgagcttggcgtcaatcagatcatgaaccagcgcggccgtctcagtgataaataagtcggcgccttcttcttttgccatataaacagaaagtgttgcgacccgggaaatatgaagccagtcatggcccgttcgttcattgataagcttgtctctgacccaattcctgacgctttccagctgctctttttcgttcaccgtatcacctcttatcgggccaaaagcctctgcaccgtatcttcaagctcttttgggttgacgttcggtgaaaaacgcccggtgacttcaccgtttcggtccacgataaacttagtgaaattccatttgaccgcttttgtgccgagcatccccttcgcctgctccgtcagatatgtgaagagaggatgagcgtctgctccattgacatcaactttcgcaaacatcgggaatgtgactccgtagtttttcacacagaactcttgaatttccgcttcgtttccaggttcttggttcatgaattggttgcagggaaatcccaatatttcaagaccttcctcccgatatgtatcatagagctcctgaagctgcttgagctgggatgtgaacccgcatttgcttgctgtattcacaatgatcatcaccttgcctctgtaagccgatagcgtcatgtcttcgcctgttatggtccgtacgtttatatcgtaaattgtcatctgcggccctcctttttacattcttcatttattttacctgttttacactgcaaaacaaacggcaaccgctttttccttccacttaacggaaaacgttttattcgaggaaccaaacggctctttacccgtcataataaagagccgctccgaatttatgcccatttgccgcttttatccctgtcattatgcgttaaatgcggtttattacgccgggatggattgaaaaatggcttaaaaatttctataatgaagaaaattaacggggaataacggaggtggcatgttgcctattaatataccaaatcacctgcccgctaagcaggtgcttgaaagtgaacacatctttgtaatggatgaaagccgggcttttcatcaggatatccggccgcagaagatcgtgattttaaatctgatgccgaaaaaaatccaaacggaaacccagctcctcaggatgcttgggaattcacctttacaagttcactttacgttcttaattccgagcacacatactccaaaaaatacggcaaggcagcatctggatgagttttatacggatttttccagcatccgccacaaacggtttgacggaatgattattaccggggctccgattgagcacctgccgtttgaagatgtttcttactgggaagaattgaaggaaatcatggaatggagcaaaacgaatgtcacttcaaccctccatatctgctggggcgctcaagccggtttatactatcattacggcattgagaaagtggagctgccgaaaaaaatcttcggtgtgtttgagcataccgttcttaaaaaacatgagagattggtaagaggatttgacgagctatactatgtgccccactcacggcatacagatattaatacggagcagctgcaatcggcttcggatctggatgtgctcagcgtttcagaggaagcgggggtctgtttaatcgtttcaaaagacgaaaaacagattttcttaacgggtcatccggaatacgataccgatacgctacttcaggagtatgagagagacatagagagaaatctttcaaacgtagaagctcctaagcactattttgcgcccggcgggaaagaacctgttaaccgctggaaagctcatgcaacgttattgtttatgaattggctgaattattacgtatatcaggaaaccccgtatgaatgggattaatttttgttttgagtgatacggtgacaaaaatatgataaaatactcttgattcagtatgcgtataacaaaactttaaaataatggaacatatcaattaaatttagtttaaatatgttgccgcgcttattataaaatgatgcacttgtgttatgtttatctatagacaataactccttacgatgcatgaagcttgcttgttgttgattacattgaggtgaatttacttgaataccaataaaaaagtattaattttgactgcaaattacggaaacgggcatgttcaagtggccaaaacgctctacgaacagtgtctgcgtctcggcttagatgtgacggtttccaatttgtatcaagagtcaaatccgattgtttcagaggttactcaatacctttatttaaaaagcttctcaatcgggaaacagttttatcgtttgttttattacggagttgacaaaatctataataaacgcaaattcaatatttattttaaaatgggaaataaacgtttaggccagctcgtcgaagagcataagccggacattattatcaatacatttccgatgattgtcgtaccggaatacagacggagaaccggaaaagtgatcccgacgttcaacgttatgaccgatttctgccttcacaaaatctgggttcatgaaaatgttgataaatattatgtcgccacagattacgtgaaggaaaaactgattgaaatcggcactcacccgaacaacgtaaagatcacgggcattcccatcaggcctcaattcgaggaatcaatgccgaaagagccgatttataaaaaatacaatctctctcccgacaaaaaagttcttcttattatggcgggagcgcatggtgtgctgaaaaacgtaaaagaactgtgcgaaaatctcgttcatgacgatcaggtgcaggttgtggtggtatgcggcaaaaacagctcgctgaaagaatccctcagtagcttggaaggtgacaatgccgaccggctgaaagttctgggctatgtagaaagaattgacgagctgttccgtattacggactgcatgatcacgaaaccgggcggcatcacactgacggaagcgacggcgatcggagtacccgttattttgtacaaaccggttcccgggcaggaaaaagaaaacgccattttctttgaagatcgcggtgcggctgttgtggtcaaccgccacgaagaaattttagagtctgtcacctcccttcttgcggatgaggagaagctgaaccggatgaaggacaatattaaaagccttcacctccccaactcttctgaggtcattttgcaggacattataaaagaatctgaaatgatggccgggaaggcggatatggcattatcgtaaaagaaaagcacacgaacgattcgtgtgctttttgtttttttccggataagctttggcactggaaaaataaagatgaaaaatagagagcggccgcttgacgcccgctcccatatggtgtatagttgaaccatcatttaacaacgtaaacatacgtacggttgaatgatgacaaaattttttttagcacgaaggtgctacagtactaggaggaattaagcaatatgcaaaacggtaaagtaaaatggttcaataacgaaaaaggattcggcttcatcgaagttgaaggcggagacgacgtatttgttcacttcactgctatcgaaggagacggatacaaatcattagaagaaggacaagaagtttcttttgaaattgtcgaaggtaatcgtggacctcaagcttctaatgttgtaaaactctaaactcaatacatgttgatcagatgacacaaatagaggagaggcgtatgcctctcctatttgattgccgtctgaatctcaattgcgacaagattctgcttgcagcgctgctcgatttcttcaatttgtttctccattgacggcattccttttttcgccatttccgctaaacttcccaaatcaccgtatatttctttaaatgtctgctgaaggattgtttttaaatctttatcattcacggctggtttttcccttctctcccaagataccctgaataatagtaaataagccctaattaatcaggttcaatagttatatcggcttattttctatatttttttctattttccgtacatatttctaaaaaaaatctccaaactatttgcggaggtgttttttaatggactctgaattttttccaaacggactgacggataaacgccagcttgaattagcggtagaaacggcccagaaaacaacgggagcggcaacccggggccaaaattcaactttggtggaatctgcttaccaggcgattcaggatgccagaacgatgtcacaatccagtgaactgcaagctctcgaccaggattttctgcaaaagcagcgaatgcttctcgacgattgtcagcatcagctcgatgaattcgaaaaataaaaccgcagaaactgcggttttattttttattgatttgccagcaccttgccgtaggctttcagcttctcccccaccgtgcattggttgatgcagaaagaatgagcgtgcgtttttccaaactctttgcgaaaatgcttttttacgaaacagtctttgcaatattcatcctgaagctctgtcaattctttataaatgctttttttatccaatatcagtcatctccgttaccttctaatgttatacggctttcaatctgccggtccgagagaatttttctggcaaggtcatccgcttcttgattttcctttcggtttacggcttcatatgtcggtgtcagctttaaggatttgagcagcgcttcaattttatccagccattcgttttgcgtttcatcataacacggccagctgccgtcaagctgatgtaaaacgacgagggaatcccctcttatcgtgattgaatttctgcttgcgccaagttcctgcacttccttaagcgcttcgtataaagcggcatattccgcctcattgttcgtctgaagcgttaagcttttgtttttccgtatgcggtatcgcttgccgccgatagaataatacacgacaattccgagtccggcgcgtccgcttgttttgtcaaagccgccgtcgaaatacactgtaatgtcgtcaggttcgtgcgcaagctcttcagtaagcttttctaattctttaagcgtccagctcgcgcctttttcatcctcaaaataaatgtcttttatataaggaaagcggctgacttctcttgcaagcatgcgcgctttcggaacggtcagccaatcttcggaaaaaaacgcgacagggcctgttccttttgcttctatttcgatatacggcttaagattcattgaaatcaccttaccattcattagttgacgggcgtgtgctataatcaaaccattctcaaattgaaaggaagtcagcaggttttgtttaacgatgtgttatggatcttatttgcggtcattcattttatcattgttcttctgttttataaaggatttggcaaaacgggcctattcgtatggatcggtttcgccacggtgtgcgccaacttgcaggttgtcaaaacagtcgaactgttcgggcttacggcgacactgggaaatatcatgtacggcaccgttttcttcgcaacggatgtgctgaatgaaaaatacggtcccagggaagcgcgcaaagccgtctggctcgggttttccactctgctcgctttgacatgcgccatgcagggggctcttttatataaaccggctgcgtcagatatcgcacagcctgcccttgagacgattttcggttttctgccgcgtgttgcgctcggaagcctcttggcttttattttcagccaaacgatagatgtttatgtatattcagccatacggagaatctttccttcagacaggcttctttggctcagaaacagcggaagcacggcgctcagccagctgctggatacatttatcttcactgccgtggcctttatcggcgtttattccgcgggagtatggttcagcatcttcatttcaacttacctgattaaatttgcggtatcactcatttctgtcccttatgcgtatgcggcaaaacgaatgacaccgaatggagagtgacggatgatgcccgctgaaatttatgtagacggtgcaagcgccggaaacccgggcccgtccggtatcggtatttttattaaacatgacggggaaacagaatctttctcaattccgatcggcgaccattcaaatcaggaagctgaatttctcgctttaattgaaggaatgaagctgtgtgccgcccgcggatttgagtccgtgtcattccggacggattcggatatcgtggagcgggccgcagatcttgaagcggttaaaaacaaggctttccagccgtttgttgacgaaatcatccgcttaaaggccgaatttccattgtttttcattaagtggattcccggcagacaaaaccaaacagccgatcagctcgcaaaaaaagcgattcggctgaataaataaccggaatgaaattgcgtctcactgttcatcctacaaatgaggtgaacagctatgagaaaggaaaataaaggccggctgactgggggcgtgaatcctcagggaaatatggaaggaaatgcgcataaagacccgaaatcagcccttgaaaacaacgcaaaaaaaagcaatacaaaacgctagagggatcagctgatctctctggcgttcagcttttcgagcatcctttcaattccttttatctgatgacgtctgagcattaatgccgcctcttccatctttaatgaaaaaagcgcttcttcaagcgtacagactaacggcacctcgcaatgtatttcagcaagctgccttgacagctccaattctttcaagctttgctgaattttcgtttgctggcccttcggcaagagagcgaggctttctaataaccggtctatgttttggtattcacggatcagcttgtacgccgttttttccccgatccctttaacgccgggatagttatcgctcgtgtctcccatcagcgccttaatgtcaatcagcgcttttggcggaactcccgtttcttctctaaatatctcatctgtatataccttataattgccgatacccttttgcagcagcgctactcgaacttgatgattcagcaattgaagcagatctttatcacccgttacaatcgtaatttccgcttccccggaaaatagggcagaaagcgtaccgatacagtcatccgcctcatagccttttatgccgatgtttaaaaaaccgagctctcgcgctgcttctttcgctagatcaaattgcggaatcagctctagcggcggttcacttctgttggccttataatcttgaaacaaatcattgcggtacgttttgcttcccatatcccagcagcagacgacatgtgtgggctgaaacgtatcaaccgccgtaataagatgctttaaaaaaccgttgacgccgtttgtgggaattccgttttcatttatcataaaattgcgatgaacggccgtcgcgaaaaacgagcggaacaaaagcgccatgccgtcaacgagcagtaatttattattcatatatcgaaactcctttttattcaatgttcctattttaccaaagaaggcggtaaaaaaacagcatccccccatttggaagatgctgccgtcacgttattcaccgtgtcttttattgcttgccatcagcttttcagcttcacggccggcataagaatcaaatttctgtccgaagccgtttttctttttggcattgttattctgctgagcatttctgtttcccagttttgttctgcccatggtcatatccccctttagagaagatacggatagtatgtacagcaagcgctgatgacacacgcggcaggttcatccattactgtctgctgacgaattctttcaccatctcttcacttacgaatcgtctttgcggcacgatgccctttttcgccagctggttcatttttgcggtgatgccattgatggcatctgtcgtgaacggtttattctgtctgcattttacaatggcttcttcaatggcctgttcacgctcataatcaagctgtacaaatgttttgacgtgctgatgctgttttgcggaatgtgctgaaattgctttatggacttctgacataaaaggtttcatctcgctttttttcattttagtctaccacgactgtaatctgcccgccaagcggatttttaaattttcagcatttcatctttctttttccatgctttttcggcttcgtaaaggtgttcaatttcccttgcactcgtattttccgcaagaccttgtaaataagtgtcccgctgctcgcggatctgggaaaggcttttatccgccatgtcttcttgcagacggcgcacctgctcagcatatcgctctgaaaggctttctttctcctgctcaagccacttttctgtcactttttgcaggctcagcctgagcccttctacaaacgctgcttttccgttctgttcaaaaaactgcttcggtgatttaacttcctttacgtgatgtgagaatgccgagacgtcaatgaccggagcgacctctttcagctgaacggcaaattcgttttcaccgctcacataaatggagaaatctccgtcttccataagcttcttctgacagttttccatccattcctcagtcatatggcgctcaataaaaccggtcatccggatatcgagcgttttcagctcttgaatatattcaaaacggaattccttgagcgcttcattcagcgccgctgatatattttgtttccaatcaccgttttgaagacccggatggaaggtggttttcagcatatcattcgcataaaacgtcaggcggtgtttaatgtgatagagctgttcttccgtatctttcatcacttttcgaatgatgacctcagacgtacggcgctttgaaatgtcagcgagagctttttcataggaagactccagacgctgtttctttttctctttttcttctgccgactggtgaagagattcgtgaagctgttccaccatatcgcacaatttgtccgcttctgttttcagctgggcgcagctggccctcattacatcttcctcaataaagtgctcaagcccggttcttacatcagagaacctgttataaaaagcttcttttttacccgcaagctcttctttacttgagacatgatataatttcggccggttaattccctcttttgagagttctgagcggacatagtctttgacggtttccagctcgctttcggttttggccagatcggcggcgttaatgacaaaaaacattttatccatgccgaatgattctttgacgaggccgagtttcttcagaaaagacctgtctccttttgaaaaagaatgctgatagtacgtcatataaaagaacgcgtcagcatcttttatatattgaaaggcaagctccgtatggcgcttgtttatactgcttgctcctggcgtatcaacaatggtgatgcctttttgcgtgagaggcgaatcataatacacggtgacttcttttacgcagcaggccgttttttcttcggctgcgtacggttttaaatcttcaaccggcaccgtcagtgtcagcctttgacggatctgttcttcatacgcatcaaacgcctgcagcatcgtctgaatcaccgggatgagttcatccggaacttttccctttttaatggcataattccatctctctttcagtgaacgcccctttacatcagcatctttcagctcagtcagctgaagcatttcagcgtccagctcctcctccgttttaaaaacgatctccgcagatttatgcggtttgccgtcttgcggtttcgttattttgttgatcgtagccgttgtgggcgtcggtgatgacggaagcacgtattcaccgacaagcgcatttgcaaatgatgatttaccggaactgaatccgccgaataacgccaaggtaaactggcggttttcaagccgctcaatcctgcttcgaaaggcttctgcctgttttcctaaaatgcttgaggattcaagaatcccggcaagctcatagaaccgatcagtctgctcttttataggaagttccttcatcgcatttttttcgggcttgcttacttcatgctgtacagcctcttttggtttcttttggacgggcgcttttgcaaggcgtttttttcgcgtataccagtcgccgcttcccgtatcacaggttaattcttcttcccacaaagcgcggacgcgggctgctttttccaaggcattgcgttcttcttttgccgattgcgcgagctcatcccttattttcttttctttttcgagccggtttttcaagttctcaatgagcggtccgttttttgtctgaacataagcggtcagctcctcaatgagttccgctgtctgtcttttggcttcccttctgatcatttcagcgaggtctttcgtataagttaatacatattcagatgaaaaggccgctccctgcttaagggcctgagcggtgatatcatcagaaagcggtgtgcggtacgcctggattttcttgatcagttcgtccgaatccgcttcataccgcttggccgctttcgtaaatgtgtcgataatatgccaatccgcttccccttccgttctttttttaatatcggcaaaaaattcagcacgccttctttctttttccgaagctgttttcgcttttgaaaagaataatccggttttaaatgagggctgctgtgattcaatataagcagatgcaagctccctcatctcaaagggtgtcagattagcgttttgcagtatgttctgcacgtcttttctgatgtctttctctgctgtttcagcctgttgaacggcttttttaagctcatcttcaacagaacggacaagtgcttcttgtttgtcaaactgctctccgctgccgtttttatcatcttttacgagcaactctgtatgctctttgactaagtgtgcaacttttctctccgttaaggaccataaatttgtttttgcctgctgtttcagcttctgcagatgttttttcagctgttccatgccgtttaaaggatggtcaggctcagtgacagacgtaaagaaaagcgattctttcggtattcccgcgccttcaagcatgtcttccacctgcctgcggtactcttcaaacttcgtttcagtttcatcatgtctgtcaatttggttgacgatcagaaataaattcggaatacggtctttgatggagctgagaaacagcatattttcttctgaatggacgtgattataatgaacgacgtaaaataaagcgtcagcctgatggagaaccgaagcggcagataaaaaatgcgcttcgtccgtcgaatcaattcccggtgtgtcaatgtaggccgcataaggctctgactccttaaagccggcatagacttccaccgtttcaatttgctcaccgtctttacagaattgctgcacttgttctttatcgtaacttcctttaatttctgcataagccccgtccgtcgtatgaagcacgactttatcttcaccgtgccggatgacaacgaggttggcgcttgtgggaatcgggcttgtcggcagtatgtcttcaccgagcaatgtgtttaataaagaggactttccggccgaataatgcccggtaaacgcgatataaacctcttcatcagccgcttttttcataatggccgcgagctgatcggcccgtttttcatcctgatgatccaaaaattgtgcgtataaggcacccgttctgctgaaaatctccctgttatggcgttcttcttctgtcatgtgtctttacccctttgtgtctgtcgcatcaaatgacgtttttcatttttagaaagctctgaaaaaaacctctcccccattttacacaagaatggctcacttttcttcaggaaacgcaaaaaagccgccgatatcggcagctgataaagaaaaaacacccgcggcaggaaaaaccgcagatgtttaagaagacatcgatttattcgaaacttttttcaatacgaaaccaattaaaacactgtatgtacaaacggctgcaaataaaaataacattgtcattttcggcaccaccttgaatgagaatcattttcatatttatatcttatcatgagtgagaatgattttcaatctctattttgcggtgttttcttctagcgctttctcttcggcgcgaatcctcacagtgagcatgcaggcattgagaatcgaaaagagaaacagtgtccaatacgctccgtataacagcggcagaaaaataaattctaagatgacgaccgcgtagttcgggtgcttcatccacctgtacggcccctttctgacaagctccgcatccggcacgacaaggattttcgtattccaataccgccctaatgataatagcgcccaatacctgatcccctgtacaaataaaatgatacatataatggcggcccaccttggagaaagcgttttttgaaacgccgccacctcagctgtaagagagacaaaaaagagcacgtgcattaggacgagaaagggataatgtccttctccgtattcgactgcgcctagctttttcaccttttgctcattgcgccgggccacgatcatctccgcaatccgctgggccgcaagcagcatgataaacagccaaaacattaagaagcccccttgtcccagctgaacagcaaaagctcagacgaaaatcccggcccgagagcgccgatcagccctttctcgttttctttctgccgtccgtggagcaactgttcttttatcacatgaaaaatagttgcggaagacatgttcccgtgtttttgcagcaccttccgagatgccgcaagctgaccggtgtccattgaaagactcgttaaataggcgtcaatgacctttttcccgcctggatgggcaagaaaggttttaatgtcgtgaggactgacaccatattcaaataaaaattcatcaacattgtccttcagccactgtgaaaccagggtgggaatgtctcttgaaaagatgacttgaaaaccgctgtcggtgaattcccagcccatcacaccttccgcatccggcatcatcaccgattgagtggcgaatatccgcggaagaagcggctgtttgacatcgtttcggttcgccttttctcctccgattagtactgcggcaattccgtccgcaaacagggaagttccgattaagttgctttttgacttgtcgttcggctgaaacgttaaactgcaaagttcagccgcgatgacaagcacgtatgcttcaggatacgcgcggcagtattcgtacgccctggacaggccggccgctccgcccgcgcatcctaagccccagatcggtatccgttttgttttcgcagaaaacggtagctgattcatcactttcgcttcaatgctgggtgttgaaagcccggtgctggaaataaaaaagatcgcatcgactttttcatatggaaagggatttgttaaacaatccgggtttgttaaacaatcaagtgccgcatccgcactgtgcttaacggtttcttccgtatacagccggtttttttctgaaaaacaccgtgccgttttataccattcaatcggccggacaaactgccttgattcaatttcgccgttttgaaaggcttttaacagccggtcaatatccttaaatgaatcggcaaacatccctctcgcaaaatccgccgccgtttcttgcgagacatgatacttcggaatgctcgttccgacagataacacatatgccatgcccatcacctctttacataaaggttcccgcttttttcctgaatgtatgcataagtttgaatcgaggatttcactgacatgccattttaataggaaattggcccttttgaataagaaaccgttcgactatacttgatccattcataaaaaaaggttgtgattgggatgctgacacctgtcattcttagagggtcactcgttcagttagagccgatgacgattgatcacactcaggcactttgtgacgctgcttcagaaaataggacgacttacgcttacacccatgtccctgacggaatcgaagaaacaaagcgttatattgagcgcgcgctttccgattatgaaaaaagacttgcattgccttttgcagtacggagtcttgaaacagaccgaatcgtcggaagcacgcggtttatggatgcggaagtgtttacgcggccggcggacgcagctccggaagtgtgtgagattggcagcacatggtatgcctctgccgtgcagcggactggtgtcaatacggaatgtaaacttctgatgctgactcatgcgtttgacgtgtggcaagctgtcagggtgacgctgaaaaccgacgttcgcaaccagcgctcacggactgcgattttgcggatcggagcccaatttgaagggatccgccgcgcacacattccggctgtcgacggcggcctcagagataccgcctactactccatccttcgggaggaatggccttatatccggcaaaacctttctggccggctcaaagcatataactgaaaaacctgccgatatacggcaggtttttttacatattcggatcatggacgtataaattgagatcgatccgtccgtctgacgtgaccgctaccccctcagcttcaagagacagcttctgtacagaaaacatctcttcgtctctcaatccgatttcgccctttgcattgatgaccctgtgccaaggaagacgatgctttttactcatggagtgaagaatcctcacaacctgcctcgctccccgcggacttcccgcaagatcggcaatttgaccatacgtcatcacttttccttcaggaatctgtttgataatggctaccgcccgttccgtaaatgtcatgcaactcctcatttcgactaaaaatgatttccctagtatcatacaacagttttgacgtcatatgatgatgccttactctggaggcttaaaataagatggtacgagttaataaaactcatgggggaaaatactttcttatattcacaaaaagttaacataagtttatatggacaaattttacatacagttatataatacagttgtatcaaataaaaaaagggagtgttttaaatgaaatttaaaaaagttttaaccggttcagctctatcacttgctttacttgtttctgctgctcctgcttttgcagcaagcccgactgcagatggcgggagtcataaaactgcagctcctcaggcagtgttaaaaactatatacatcaatgctaatacacgtggagaacttcttaatgtaacagtatttgctggagttaaatactatttaaaagatgccaagcagaacagtgatggtacatggactggtgaataccaaggttggttttaagattatctaagggataagagatttttctctcatcccttttttcatagttgttttccctactaacctcctaaaaaacacgatcagcgaagagcgttgtgcggcgatcctaagcaaccgtatttcaagctctgtctcagcagcagaccgttgttcctcaatgcattttagcagaatgtctcagtatgcatccttttttgttcccaaccatgccgcttttcctatgacttaattgtgttaattgacaactcgtatttcttggcaaggttcttctatttcatgccttacgcactccttatactccttggtgtgcttttcagccaccaatattcaccgccgcctcttgtattggagattccgaaatgaattcaccctcgcagaatagtttctccagttaggaaaacacctaaaatgaataaaattaaatgtaagggcaataatttttcgtgagcaagtacacataaaacctcttacttgctcttttatttttgataaaacacaatccagggtgataacatgagatttgcttgggaagaattaattataattgcattcggaatgatcttactgagaatttcagggagaaaatccattgcacaaatgaccattgcacagacaatggtgatgatttcaatcggtacgattatcgttcaccccattttagaaaccagtttattgaaaacattaatcgctgcgtctatcctttttagcgctttgattttgatggaatggtttcaagtaaaagtaaactggattgaatcttttttaactggaaaatctaaattcgttatagaagacggccaactcaatatagaaaacttaaagaagctgagactgacagcagatcaactcgaaatgcgtttaagacttcttggcatttcaaacataaacacaattaaatatgccactttagaagctaatggacaattaggttacgaattaaaagatgactgtaagcctttaaccatcaaagaccttaaaaatgtgatcgatccaaaatgtcttaacaaagagcctcagcctcaaaaagatgatcaagccaatatattcaaggaaatcaaaaaacaccagactcagcacaagccaaaaaatcttgaataattcgctgattagtaaagccttttgttattcaaaaccgatgccgaatcagaccgttaaccgccaatcattttttaccgaaaccggtttacaagaaacaaaaaaagcatctgaagcagatgccttttttcaatcgatattgcgacgatgaaaaaagtcggcaacccccgtattttccgacgaggtccttgtatgagcctgaatttcagccgcctatctctaccgccggccttagccataatgttaatcagtttgtttttataaaatcattgattaattgatcagtcgttaatattgtggcgaattcatcatgcaatgttgccagagatatattgtgaatagtctctgcatcataatatgtatcattttgatctctcattccgaaggctgctgttgcatctgaaatcagatatgtatcaaatcctaaattaccgctcatccttgtggttgttgaaacacagtgcggcgtagtcaagccagtgattacgacagttgttatatcatttgcttttaaaagctcttctagattagtcccaataaagctgctgtttacttttttggttataatgacttctttttccataggtttaacgatttcctttatagcaaccccctcattttttggataaaataaagaaccaggtttatcagaagtatgttgtatgtatatgactgtccatcctttttctctccataatttcagtattttgctgatattttcttccgcctttacgttatttcgttctccccactttttatcatcaaagactttttgtacatccacaatgattaaagcttttttcttttctgccatcagataacctcctatattgaaaatccgtatttataacattttaaataaagattttacttttgtacaattgtttcagtgttaaatttcatatcgcaccttccccgttggaaaagcattgaaatatctaaagctagcactcactcaaaagctgcagatcaccagaggccagcaatattcaactctttttctctatatacttatcaatatcctgaaataagccgcaacagtgaatgaaaagattgcccctaactacattcacgctcgcaaaatattaacaaaaaaacccttggttatttttatattgtatgtaataatacaaatgtattaaaaaacaaaggagtgttcaaaatgaaattaaaaaaagttttaactggttctgccttgtctctcgctttactcgtttccgctgcccctgcttttgcatctagccctggtcatacaaatagcgactcaactcaaacaaaaatttcgacacaagcgaccagagattcttttacaatggattaccttcatagatgggatatcccaaatacaactgttaagaatggtgttacatattaccttaagaaagtagagataatcgaagggttctatcgcgcaacttttgaaggatggattaattaaaagaaggggctttcccttcttttactctcttttgtaagaattcgtgcacaagatactcgttcacgtacatatagtccgggacggtttttcggcgaaataaggcggatgcctcatcactcaatttgtttcttttcaaacaatgaaactaataaaaaaagagaatgcctcgcaaaaagttcagcaactttcggaagcatcctcgatctggataaaataagatgttattttaaagaaaacggatgactaaccctcttgaacccttgtcacatcaagggtttttttcgttttaggaatcatattataaataatgttcaaaaggacggcggtaaagcttccggcgacgattccgtttgtggtcagcagatttaagtaagacggcaggtgcttaaacatatcgggaacgacggttacaccgagtcccaatccgaccgaacacgcgacgatcagaaggttttcctgctttttaaagtcaatttgactgagcattttaatgccgtaggaaatgaccatgccgaacatggccaccatcgcgcctcccagtaccgaagacgggatgatggtcgtgaaggctgcgattttcggaaaaaggccgaagagcattaaaagtgcgcccgtgacaccgataaccgcgtttttcttaattcctgtcagctgcacgaggccgacgttttgggaataagccgtgtacggaaaagcattaaaaatgccgctgatgaataccgccaggccttccgcgcggtagccttttgctaaatcacgttcagacaggcgccggtttgtcaggtcaccgagagcgaaatagacgccggttgactcaacaaggctgacaatggcaacgatggacatcgtaataatcggtgccgcatgaaatgtcggcatcccgaagtaaaacggtttaatcatttgaattgcgtcagcattcgccacattgtcaaattgcacttttcccataaaatatgcgatggccgtcccgatgacaatgccgattaaaatcgaaatggatttcaaaaatccttttgtaaaccgataaagcagcacgatgatgacgagcaccgtaaatccgagggcaaggttagccggatcaccgaaatccttgctgccttccccgccggcaatatgattcatcgcgaccggcattaaggtcatcccgataatcgtcacgacagatccggttacgacaggcgggaaaaaggatacgagcttgccgaagaaaaacgacagcagaatgacaagcagacccgatgccaaaatgctcccgtaaatggctgaaatcccgtactccttaccgatggaaataatcggcgctaccgcggtgaacgtacagccgagcacaacgggcaagccgatgccgaaacatttattcctccatacttgaagcagcgtagccgccccgcacataaaaatgtcaattgatacgagatatgtcagctgttctgcgttcagtcccaatgccgctcctacaattaagggaacgacgacggcgccggcatacatggcaagcacgtgctggataccgagtgaaagtgttttggcatagccgtttttcatgaacggacctcctgtacaaatgtcacttttccgtcttcaagcgattggattctcgccagtgattcgacccggcatccttttttcaccagctcatctcttcccggctgaaatgacttttcaatgacgattccgatcccgcaaaccgctgcgcctgcttgttttacgatggataaaagtccttctgccgcctgtccgttcgctaaaaagtcgtcaatgattaacacgcggtcatctttcgacagatgatttccggagacagcaatctgactttctgtttttttcgtaaaagaatagacggatgccgtcagcagatcatccgttaatgtgagagacttcctttttctcgcaaagatgacaggaacgccgagttcaaggccggccatcaccgcaggggcaatgcccgaagattcaattgtgacgattttggttatctcgtctttttcaaaacggcgcgcaaattcccggccgatctgctgcatgagaactggatcaatttgatggtttaaaaaagaatccactttcagcacttgatcagaaagaacaattccgtcttctgctatttttcgttttaatgcttccacaatgattacccccgcttataaaaaataaaaaaagcattgcccgctctccaaaaaaagagcaagcaatgccgaatgatctacacgcaacggccgaataaagccgttccattgctcactcatagtcggacatttacggtgaccggtagaaacttgcgtgccatatccacgcgattatatgagtgttcgtatgatattaatcaaattataacaagatacacttcttttgcatagtgaaatttgaatatttccgaacttttacaaagaattgattttcgattattcgtgtttttagaatttttagaaaaacacccggtgtatgccgggcgtttcgtttataaatataaatttgaatatttgccgacgagatactcaatgagatattgaacgttcagctcttctcccgttgcatcttttatgatgtcaagcggcattttgcgtcttccgtgctgatgaaccttttctgtcagccattgtttgatcggctcaaaatcgccccgttctattaattggtcaaattcaggcagatcgtcaagcatggtatgcttcagctgtgccgcatacatatatccgagcgcataggaagggaaatagccgaaatcgccgcccgcccaatgtacgtcctgcaaaatgccttttgcgtcagatggcggcgtaatgcctaaataatcatgatatttttgattccacaatgcaggcagttcttccactgtcacttcattgctgaaaatcgctttttcaatttcataacggataataatatgaaggggatatgtcagctcatcggcttcaattcggataaatgtcggtttcgcctcgttgacagcgcgtacaaaatcttctcttttcacatcttgaaattgatcaggcgaagcctcaaccattttttcataataggcggtccagaaatgttgatttctggcgataaagttttcataaaataacgattgggattcatgaattcccatggatgcaccgtcagataagttcgttccgctcaacgcttcgtcaatattctgctcgtagatcgcatgcccgcattcatgaatcgttccgaaaatcgccgtgcggaaatcgttttcgtcatatctggtcgtcacccgcacatcgccccggttgattgtcgtcgcaaacggatgcaccgtctcgtccaggcggccgccgtcaaaatcatacccgaactcttttaagaaatacaaggagaggtctctttgttgttctttcgaaaacgttttcgttataaaggaagtgtccggtttattgccggattccgtcacttttttgataagcggaataatcgcttccttcaattcagaaaacagctgatccagcacctttaccgtaacacccggttcgaaaatatcgagcaatgcgttgtatggatgatcttcatagccccaatacgaaataaaccgcttattaaaatcaatcagcttctcaaggtacggagcaaacatagaaaaatcagaggcagcctttgcatcctcccaagccgtttcagctttcgatgttaaaatgacatattctttatactcatcttcaggaatttttttattatgatcataatcttttttcgcaagttccgccgctttcactgtatcttcagagagctcttctgcatgcgcgagaaggatgtcgatcagctctttcatccggtcggatgtctggatttgaaaaacgtcagccgacagctgtccgatgctttccgcccggtcatcagagcctttttttggggctcccgttcttaagtcccaatgcataagtgcaatggcttcgacatagtgggatactctttttaacagatcaaaaaactctttttcatatgtatgtaaatccatatccgttcccctcccttttcactatcaattacaggctaatggaatgccgtgataaagtcaacttcccggatttaaaaaagccgcaggataagaatcctgcagcttttgtttttatacgattttcggtgtaacaggcaagatctttttgacttcggccaagacccgttcactttctccgcccgcataaatggatatggttccgctgtcctgattagaacggatgaggcggccgattccctgccggactctcaagagcatgtacggaagatcaacttcctcaaacggatcttttttcgctccgttccgctttgcggtaaacacgggatcatgaggcggatacggcaatgcccaaatggtcacattccggagcgagtcaccgggaatgtcaagaccttcccataagtggacggaacaaagcacggattcttcatcccgctggaatttttcgaccagactgctgatctcttcatcaccttcgtagtatatcggatacggcagctcccacgcggcagcctgttctttaaattccttcatgtcttcaaaggaagggaaaagaacgagggtgcgtccttcattcttcttaatggtttcaatcgtttcggctgttttctgctcagacgtcatatcaccgtgaagcgcaacagacatttgctcctcgtaatcgtacggagattcaacggtgaatgataaaggatcacggattccaaggctgtcagcgatataatcaaatgaaccgccctcagaaagagtggccgatgagaaaatataagggatctttttagaaaagaccttttctcccaaaacttcggctactgttctcggcataacgacaaacgttgagtctgtatcccgcgtttcaagccagctgatggcatccttttgatacagcgacagcgaatatgccatttgttcgacgtattcttctacgactgacagctcgtacttatcgatcgtatacatttccgattcaaatacgagcgcctcgccgattttatcgagcagacggcacagttcgtcagccgcacgcttaacacgctggtcgttttggatgtccaatcggtgagagccggcgatttccttcgattcctctgacagcacatagaaaaactcatcgtttgcggcaagggcatcttcaatcagttcggcgaattcctctctgatgtcattttgaagcagacgctctaaaaacagctcaagcgtcgactgcttcacgcgatacgttaacgctttttgcgcggcgaattccagcagatgtccttcatcaaacacgacggcgctgtgatccggcaaaagcggcagctgtccttcccttttgcgtgattcttccgtccatacatgctccatgtagaaatcatgggagcaaacaatcagatccattgattttctgtaatgatctctcgaaagtgttaaaccgcatctatgtctcatatcacaagttaaacaatcttggaaggaatcatagctgacgcctgcccactcttcattcgtcaaatcagcgtactgtttgcggtcgccgtacggataaaagcgctgcatcgcttgtgattcgtgtacgaatgaaggcagcgactcataaagatccagccacttttcatcatcagaacgctgcatcgttttctcaagctttttcagacacagatactgctcatgggatttggacagccgtgtatcaatctgcagatccaaatgttctgtcagcttggaaatgtcgccttcttttttgacaagctgttcaattaacgtttcatcggcgcatgcgataatggccggtttacccgtatatctggcatagctgatggcaaacagcagatacaccagcgttttccccgtaccgactcctgcctcagcgaacatgacttttttctctttaaatgcccgttcaagctgaaacgccataaatacctgctcatcccgaaggtcaaagcctttctcgggaaggatatcgtaaaacacgtcaccaatccaattgttcaattcttcgtaaaaattcttttcttttgttaaagcaaaaggcaaacgtgatgttgtcacccaactccaacccctaactattcggcattcagaccatctataatatcatttaacccttttcaatacaacaaaaaaacttggcctcgccaagtttttgccattatcatttccggttaatgatatgtgtacataggaacggatggtctgttgaatgtgtatgttttaccgcattttcaagttcttcctgtgcgtgtgtcatggcggaaggaccgaactccgctccggcttcctccagccggaaagcagttgcgtctaacgccttttgtattttactgaagtgctcgctgttcagcataaaatagatcacctctcaaatagaaataatcatcattctatgccgatgcttcactttctatacatgccattctgaatgatccgcacctgacctgcacaaactacaacagatattcgatcgaatatccatcttcacaaaattattctatccgggagtgatggttacatgagttataaagatcgattagatcagcattctgaattgtttcatcacaattggacgcggccgaaacgctctaaatcgcaagtgaacggccacaccgaaatgtcccagaccaacattattttacggagcaacgcaaaagcgcaccgctggtaatggcagaataaaacgtaaagatgccggagaagacgctgtttcaggcgtcttctctttgttgcggctttttccgctgcggccgcactttagcccaatactgataataatccgttttgataaaaccgttaaagagcttccgttttttggttgcttttcttccgtagacctcttcaaattgttcatttgacgttaacatgtagacagaccatgtatcaagagattcaaatgcccggcccatttctttatacatctgctcgacttcccttttttcgccgagccgttcgccgtacggagggtttccgacgattacgccgtattcgagcttcgtcgtaaaatcctgcacccgcatttgcttgcattcgatcaggtcaccaagtcccgcttcttctgcgttttctttggcgatgtttaccatccggtgatctacgtcactggcaaagatctgcaacggctgatcatagttcgccttttcttccacttcaagacgcgccttgtcccacagttcttttccgatccattcccagtcttctgaaacaaaatcacggttaaaaccgggagcaatgttttgtccgattaaagcggcttcaatggcgatcgtgccggaaccgcagaacggatcgacgaacggacggtcaggcgtccagttggttaactgaattaacgcggcagcgagcgtctctttaatcggagctcctccctgatcaaccctgtatccccgtttgtgaaggcctgttcctgatgaatccagtgtaagtacggctttatcttttaaaagggaaatctccaccttatactcggggcccgtttcttcaatccattcattttgttttcctgattgcagtttcagcttttccgctatcgcctttttgacgatccgctggcagtcaggcacactggcaagcactgatttcacggactttccgataacggggaactttgcgttttccggaatgtacgcgcgccagtcaatcgcttttgttttttcaaacagctcatcaaacgttttcgcctgaaactcggcgacctgtactttgatgcggtcagccgtccgcagccataagttagcgcggcagatcgcaagcgcatctccttcaaaaatgacttttccgttgtctactttgcattcataacctaaatcacgcacttctttggcgacgatcgcttcaattcccatcggcgctgtcgctattagtgtgtacttcttcatcgtatcaccctgtctcttttaagctttcgtttcattcaagataaaagctcccctttaaaggagagctctaatttgtcatatcaataatgtttaacgttctgtaagccatgttttgttccgtcgtactgcaatcggctcatcacctcgtactcaggcggcaatcatctatctacagaaagcattctgtccttctatctgttcaattccttcaagaaggttcccctaccaaaatttgggtttctcgctcgaggggtttaccgcgttccactctcaccatttctgatgagacttcgtcactgtggcactttcaaggatactcagccatatccggagacgtaggcttttttcctgccgtcagcctatcaaggctgccctagcttatttcttcgctaggcacgaacactacgggcatctcagcaccgtgcgagcatggactttcctctacagattcaaagatctgcagcgattacccgaacgttaagaacacttgttcattataaagcaacttgtctcatttgacaagtgcatctgccctattcgtcataaagtttgcttccgaatacatgtttctcaaggttggacagccttttcagaatgtcaaagttggtcgtattggactgcaccggctgttttttgcttgcttcttcaagctgttttttcagctgcagattttcttgctgcagttcttcaatttcttgatgaaaggtttcataatccttaataatcatatctaaaaatttgtcaacgtcttcttgtctgtaacctctaacgcctgttttaaattctttttccaaaatgtctttcgcagaaagctttactttatcagcaagcatctttttcacctcatatcgtgaatcatcatgttatattttattcagaaacacgtcccgttgtcaaatattctctgacgtgttatgtaaagaaatcttcttcttcaacggcggcacggagatcatccatcgtgatcgaataaatcggatatccgtctgtttcacggcgtttttctgcctgctgcagcatatatttcggcgatccttccatttcaggatcatataaaagcaaaagcgcatctgacttttcaataaagaacgcgtttttctgccggaattggagcggactttcgtacggccgatgcgtcaggctctcctcataatctgcctgagcaagcaccgcttcatacatttctttattcggttccttccacttttcttcttggccgtagaaaggcgtgataacggcaacctttaattccggatactcttctctgagatcgtacgccgtttctgccgcccaaagctcagtccccagctgtccggatatgagaatccattccaagccttcgtcaataaagcttctgagtctggtttctatcgccttttttatataaacaagggcccggtcatcctgtttaaaaatcccgagttcaaacggcttgtatcctgttacggctaatactttcaattgatcacctgcttaaaaaatggggctccccatcgggccccattttgatttgctgatatcctaaccgatcttgcttaagcgttcaatactaatgatcgcagcaagggcttccgcactgaaaatgctggtgagttgtcgggtcaacatttgaaaaagtgtgcggatagtaatgaacgtgctcaaagttgtggtgatttacgttagttgtatgttgcggatgaatatgcggcacaactgtgttagaaaaacaatggtgttcacagcaatgagtcggatggacaatcggcggcatcacgtttggtctgcaacaatgatgatgaaacatgctaaatcccctctccattaacttttattacactgttaggttatgaagaaaagagggtgcatgttctaattcaatcacccaatttaaaagtgcgtcagcaaactgtctttaaaattcgaaaatacaaacgcaatcaaaaaaaccacgacaaagaacaagtaaaaaacacctttatacataccaactctcccctataaataactaacgctattttacaagatgcggcaccattctacaacaaaatcgatgcggattcagaaaaaaatatttttggcgaaacagctcggcttttgcgctttcccgggcaatatttcaagaggaatatttcctcttgagccgggcaattctcacatggagcttctcggcttctttttccgatatttccccgtcttctgccgcctgctgcgcgacctgcagagcttttttgtaatcttttgcgtgatgctcaaaatagatcgccagctctaccgctgattggtgtctgcatatgtgaagagcagagcccgtcagtttctcccaaaggggcacggcgtcttgcctgcggttttgttttttataaagcattgctaagtcaaaaagggcccgatccgaatcttcaaaggctttgccttgcagcgcttccagctgtgaaacagcccgatcggtttctttatgagcgataaaccatttcgccatggcgtatgcttcctgacgttctgacgtctgatcagaagatgcaaaaatcttttttgacatatggatgtaaagagcgatgagggaaagcacatcttgttcattatgcgagagcactccctttaaaagagccggatcctccgcctttaaaaattgaaaatacagcatcggcgccaaataaccaggggtgtcttcgtcccttttaaaagcaagctcttcattttcaaccgccgaaagcgatacacgctctaatttatgtttccaaagccgtctcgccccgtgcagaagatcaaagtgaccgaagtcaggaagcttcggaagcctgtcccgcagcaatgtatgcctagtttttacctgcggccagtcaaaggcttttccgttatacgtaacaagagacgtaatgtcaacctcacttaaaaagcttttgtaaagagccgtctcgtttcccggtttaggaagcagatgctgtttaaccgcgacacggtcttcatacactcttgcatgaccgagcaaaaagatcatattgccggccccgccgccgaggccggtcgtttcagtatcaaagaagaacagctggcttttttcgtatccttctgctgataaagtatgtgtcaatccgcctttattccataatgccatgacgtcatcaagttcactgaagctgtaccgtccgtggcggtgcgaaagcggatagacggtttcgcggataagacagtattcatcctcaaaaaagaaaggcttcactccgaatgcctcccattcttctctaaatgggacttgaatatccgggaccgaaagttgtgaagatgccggctttttttcagcttccggcacattcaggtggtttttcatccgctttaatttatttttcaaggacatctttcgtcccccttttcttttacacgtaattcaagagccggagtatcgctttctttgcatctattccttctatttcggagccgatgcaggaaggacatccgtcttgacatggacattgtctgatcaggcgctcagccccttcattgatttcatcaaatcgcttatatacttcatcagcaagtccgattccgcccggataatgatcatacagaaagattgtcggaagtccggtatgtgcggctttgatttgcggcacgacatgcacgtcatttcggtcgcacatgacgtatacaggcacgatatgctgcaggacgtgggcaatgcctaaaagcagctgttcaagcgttttttcgccgatctccgaatccgtctctttcaattcaagccaggcagcactggtatgcagttcttcttctggaagatgaatcggccctgatcctatattttcaaatgtcgtcattttaatttttttaaatattgtcggaagtgcgttcacggttacatcgccgaaatgtaaggctgttttctttctgctgtccgttctgtcaatgtccagcactttcagctgcaccgctaaattggcatctgtataatattcgacatcgacctttcgcacgtacgcttttttatgatcccaatcaagcttttcaacctggtactgcaccccttcatgaagataaatcgcttcatcatgaagaagcgtcatcgcgctgaagcggtccatttctccgatgatttttacatcagccgtctctgaccggtcaacgatgaccacgttttcctgtgacgccgaacggagactgatgttggaggcgggaaaagattcgctcgcccagtgatagcgttcgcggttttcgtgaagcaccccttcttcttctaaatactcgagaatatctcttgcatcattttctccgaatgtttcatcggctctgaaaggcagctcatacgcggcgcatttcaggtgatcgaccagtataatgagattatcgggattaatccttgcagattcaggcgagcgtttaaagaaataatcaggatggcgcacaatatattggtcaatcggatcagagtttgccaccatcacgataagcgcctctccctgccgccgcccggcccggcccgcctgctgccatgcgctcgcgacactgcccgggtaccccgtcatcacgcagacctgaagctggccgatatcaacgccgagctccagcgcgtttgtgctgacaacgccgagaatgcttccgtctcttaacccccgctctatttctcttctttctttcggaagatatccgccgcgatagcctctgacagacttcgacccgatttctttttttacgatctcctgaatgtggcttaaaataatttcaacccggacacggcttctggcaaaaacaatcgtctggatcttattttttaaaaaagttttggcaagttcgttcacttccacggtggcgctttttcgaatatgcagcggtttatttacaatcggaggattgtaaaaagcaaagtgctttcttccggccggggcgccgttatcgtcaatcaggcgcactgattttcccgtcagctgctccgccaattccctcggattggcgattgtggcggatgtacagataaatgacggcgtgcttccgtaaaaagcgcagattctcattaaacggcggatgacgttcgccacatggctgccgaatacgccgcggtacgtatgtaattcatcaatgacaatatatttcaggttttcaaacagactcacccattttgtatggtggggaagaatggctgaatgaagcatatcagggtttgtgatcacaatatgcccggcctttctgactttctgcctgatggccggagacgtatctccgtcataggtaaagcttttaatgtccatgcccgtctcgtctatgatttcgttcagctcgcttttttgatcctgcgcgagcgcctttgtcggaaataaataaagcgcgcggcttgaggcatcttccgcgatagactgaagaaccggaagattatagcacagtgtttttccggaggccgtcggtgtgacagccacaatgctttctccgttttgaaccgtctgaaaagcggagtattgatgtgtaaagagccgctcgatccccctcttttcgagagccgcccgaattttccgatctacttgctccggcatcggcatggttttcgcctcccgcggttcctcttcatgccaatgcacaatattttcatgattttttaattcctgaatcagttcgctcaatgattttttcttcatcgttcacacctctttatgaggtacagtttaccgaatatttgtttgcctggctagatgaaaatcctgcacaagaaaaaaagcagggaatcagcccctgcctacttcatttttatcgtaaaaagctctgtttgtccttttttcgcttcatttgcgcctgcaaattgcaaaggttctgcggcatcgccattcataatcaccatagggatgacggtgctgcttgctttttcttttattaaatccagccggcatgttaaaagcagatcgcctgttttcactttgtctccttcttttacatgcgcttcaaagccttcaccgttcatattgacggtatccaaaccgacatgtatcaaaagttccgctccggaaagggtgcggatgccgacagcatgttttgtatggaacagctgaatcacttctccctcaaccggtgaaacaatgtctccgtttgcaggctcgacggcgatcccgtcccccatcattttttgtgaaaatacgggatccggcactgaagccaaatccatcaccgctccgtcagccggagaaaagatcacttcctcggccggctttttccggctgtctcccaatccgaataattttttcagcaatgtgttgtgctccccttcctaaatgtgaatccgttaccagtttattctccactatttaaccatactttcttttttccttcaattcttaaccatacggcataacatcgcatagtctgtttgtaaaaaggcggtggtcatatggatcaatcacaaaacgataaacttgatccgcaaagaaatgaggacatcatcagccatgcgatggaccaattttttcactcaggtcccttcgcagaattgatgcagggttttcagcaccttgtcaattcggcttttactgaagcgcaagtgacgattgacgtcagagaagagccgacgggcctcgcggttgatatcggcgttcccgagacgttccgtgacggtgatatgctggtggaaacgaaggggtgctaccttcacgttacaatccgctacgatcataaacaggctcattcatcccatgtgtcttcaagcatgacaagaaccgttgtcctcccgtataaggtgagtgaagaagatatggaaacatcctggaatgaacagacgcttaccctctttttccctaaaaaataagcatgaatgatggatatcattcatgctttttatttgaagatactggtgaagcctttcaccagcgatccgacctgatttacggcgcttaccatctgccccgttgtatctatcattttattaaagtcaaactgtccgttcgtttttttaaactgggagagtatgcctgagaattgggaagactgctgctgattcggtctgggaacggggtaaggattcacaaaccccggctgccccccgggcatggctgcctgaggaggagagggagcaaacggctgctgcacatgaccgtattcctgattcggataaaattgctgcgggtactgcccttgctgatgatatggcggctgctgcaatggctgtatctgctgcggatacggctgctgtaatggctgtatctgctgcgggtagaaatatcccgccggctgctggtacatattttgatatggctctgctctccattgcatatgacattcccccttgtctctcactaagtttctgctatatatgtatgaattccgccgtggttatgtgctttcggtgattctgatttttgtcaaatgctgtcgaaagtcttaattttttaaaaacagaaaaaagtcgaatcgttatgttaccataatctcaacatacatgagaggggatgcaccattatgaacgtatcatacttaagaaagcgttttgctgaagtgaaaaaatatgaaacagattgtgcagataaactgatggactttgcaaaattcctctatattcaaggccatctcaccgcaaccgaatttcgaaacagtatgaaggttctcgaagcaagtggagcagaaaacccggcgtatgaataacatacccgacccctttatataaaagaaggcagccgttttcagctgccttctttttcaatttcatcccttaatatacgaagcgtatataaaacagattcagttaaatccctgtatctttttttatgaatatgatgaacatatgattggagcatcagctctccgaaattttctgtaacggcctgaatttgtgcgtgatgaacgtatttcggacggttttcctgaataaacgcaagcgctgcttctgtccaaagcgcgcaaagccggtctcttttttcaacatcgggtttaataatctcaaaaaaatcatatgaacggcctgactcttttccatcctgataccttttttcggcttccagaaccgcctctatcatttgttctgtcagctccaataacgactgtgtctgcaaacggactcacctcagtacatatggtaccaaagtttttgcataaaatcagctgatccggcaggctctcggcaaatcctttttacgccggtcagtcaaaaacaggtcatcaatacaaacatgaagctcccgcgcctcttcctcaaggcgggaaagtttctcctgtctgatttcttcagcttccgcctgacaggatctgactgcttgggtaagcgtcttttcagcagcagaaatccggatttcaatatcagaaagcagacggagaatatcagccttgctcgtgtaaacagacattcatgttcctcccttttatcacttgcgtctctttagaatataattctcgttttcataccgctctcctctgcacatgacaaaactagaagcagttcggcaaacaaacagagattatcctaaaaggcgtgcctttcgacaaaaaagtgccgcaaactttgtatgaaccggcacgttaatgcaaacgatacagttgaggaggtgccgtatgaaaacgagaccgaaaaatgcaggtaaacagcaaaaaaccgaagcaaaaacgactgatacgcttgataaaaaattaggcggcccaaaccgcccttccacgtaacacatcagcagcccgaaaccccagcgaacggtggtttcgggctttttcatttcttcagccactctttaaccgcgaagagcgcatggagctcccgtcttttctggaagtaccagtccgtcagttcaagctgtttcggcattttctcctgtaagaaagccccttttcttaaccttttttgaaaccaatccgccctttcgccgtctaatggatgggcaacaatgggataggttgtcctcagcatcggtgatgttctttttttgatgccgatcattttctccatatcaaagcgtgaaccggtatgaggaacggtatcaagaaaacggtaaaaagaagcgtgaagatcagggctgaacagtaggcgggccagctgttttccgagcgtaattctctcttcggtttttgaaaaccgtttgacggaaattccgtataaatgtccgtcaaatgaagggaatatcaccgtattaaagtgaaaccaatcacttaaataaaaaggaatcgtgccaaaaacattctttttaaacgaaggattttgtataataggtgcttggatagtgttttgttcatttataataagagcatacatgagccgttccgtatctctgtcacgccaaaagcggaaccattcttcctgcataaaagccgagacgcggaaataaggaagatgacggaaaagaggttcgccgatttgttttgaccactggtagaccagaagctgaggataggcatcagaaaaaatcagccaattcgccctttcatacgaaaggaaaaaccagtttttctgactgctgtcaaggccctcctgataaaggacgcctcttaaatcagtcatcgaccagcccgcattgcgggacacaaacgatgccaaaagcggccacttgatctcaggatggcggtcataatatgctttataggcattcgtccgggaaatattatcggcattttttattttcgtctctttttcgatcaggcgaagaatggcggttacggtctgtcgtttatgcacgttcattcacttccgtcactattagtttgataaggaggatggaaaaagtgattcggtacccgaatggaaaaacttttcagccgaacaaaacggtttcatcccaaaacagccagaaacggtctcattcatacagtaatcgcggcatgaccctcgaagacgacctgaatgaaacgaataagtattatctggctaaccaaattgctgtcattcacaaaaagccgacacccgtccagattgtaaacgtccactatccgaaaagaagcgccgcagtcattaaggaagcttattttaaacagtcttccacaactgactacaacggcatttataaagggcgctacattgattttgaggcaaaagaaacaaaaaacaaaacggcatttcccctgcagaattttcatgatcatcaaattgagcatatgaagcaggtggtcagacaagacggcatttgttttgttattatatccgctttcggaaaggtttatttcctcgaagccgacaagctgtttgtcttttgggagagaaaggagaacaatggcagaaaatcaattcgcaaagacgaattagaagatgcttcctttccgatttcccttggatactcaccgagaattgattatattagtattattgaacagctttatttttcgcaggaacagtagactgagcgaaaggttgataaacgaaaggttgagatgttatgtcagatcaatttacgagccgtgaagaacgccgtaaggcaaggcagacgaaaagcactaagccctcttcaccgaaaaaaggcaagaaacagcgtaaaggcggtttattcaaaaagattgtgctgtccttggttattctgtttgtccttggcatagtcggcggagcggcggcatttgccgttttggtttccggcgcgccgtctttggacgaagccaagctgaaaacgccttactcttcaacgatttacgataaaaacggcaaagaaatcgcggaagtgggcggtgaaaaacgaacctacgtcccgattaaggatatacccgatgttgtgaaagaagcatttatcgcaactgaagacgcccgtttttataagcaccacggtatagacccgatccggatcggaggcgccttggtcgccaactttacggatggattcggttcagagggaggaagcacaatcacccagcaggttgtgaaaaactcgcttttgacccatcagaaaacgattaaacggaaagcacaggaagtgtggctttcactgcagctggagcgccattattctaaagatgaaatcttagaaatgtatttaaacagaatttatttctcaccgcgtgcctatggcgtcggtaaagcggctgaagaattcttcggcgtaaaagatttgagcaagcttacggttgaacaggcggcgacgcttgccggaatgccgcaaagcccgaccggatataacccggttaaaaatccgaaggcttccgaaaaacgccgaaacattgttctcagcttaatggaaaaacaaggattcatttcaaattctgactaccaaaaagcaaagaaagtgtccatgaaagatgaaggcgtcgtcagccaaaaggaatacgataaaaaggacacaaataaatacagcgcttttgttgaagaagttatgaaagaaattgagacaaaagaaaagaaagacgtcgatatttcaactgacggattgaaaatttacacgactcttgatacgaaagcacaagattatcttgatcaattgatgaacggagatacagccggcttttcggaaggcatgcagggcggcgtcactctccttgatacgacaaacggagaaatccgcgctatcggagcaggacggaacagaactaccgggggattcaattatgcaacacaaggtaaaacccagcctggttcaacgataaaaccaattcttgattacgggccggtcattgaaaataaaaaatggtcgacgtatgagcagattgatgattcggcttatacgtactctgacggcacaccgattcatgattgggacaataaatacagaggtcagatatctatgcgagaggccctcgcagactcacgtaatattcctgctttaaaagcataccaagcagcaggaaaagataatgccgtcgacttcgcaaacgacttaggattgggattaaacaaagatcaagtatatgaaccctactctatcgggggatttggtgagggtaaccgcggtgtatctactatgaccatggcaggcgcctacagtgcgttcggaaataacggaacgtacaacgaaccgcacgcggtcacatcgattgaatttaatgacggcactaagcttgatttaacaccgaaaccgaaaagtgctatgagcgactacacagcgtttatgattaccgatatgctcaaatcagctgtcgaatcaggaacaggtaaactggctcaggtgccgaacgtggaagtcgccggtaaaacgggtacgaccaactttactaaagaggacattcaaaaatataacattgctccgggcggagtcccagactcatggtttgtcggatacacccctcaatatacagcggcggtttggaccggagttgagtctggcaacaaagcaggcaagaaatcactgtcttctgctgaccagcaagtcgcaaaacggattttccaaaagctgatctcatacgttgatgacggtaaaggaagcttcaagcagcctgacagcgtcgtcaaagaaacagttgagaaaggctcgaatcctgccgctttagccggaccgaatacgccggatgataaaaaagtgacggagtacttcgtgaaaggaacgcagccaactgccgtttctaaaacgtacacgaaagaaaaagccgataaaccgacaggattgcaagtgaaatacgacaaagataaaaaatcattaactttaagctggaattatgacggtgatgcaacattcaatgtcaaacaatccgttgacggcggaagctacagtgacattcaaaacagttcagcaaaagaagccgtcgtctcagatgtcacaccaggctccacatacagcttccaggtgacagcggaaaacgatgacggaaaaagcgatacggcatcagcatctttcaaagtcccgaaagatgaagaagacgatgcggataaagataaagcgactgacgatgaacagaagtctgatgaagataaagacaaagacaagacgcaaaccgatgattcaaacacagatgacaatcaaacagatacgtctgacggatcggatcaaacaccaactgatgacccggataaaaatcaggatcaatccgataaggatcaaacagataacaacaatcaaaatcagcccggtaacgggaccgataacaacggacagcaagataacagctctgataatgattccgattccggttcagacggctcaaataaacccgacagcggtcaaacggacaaaaacaaagactcatcttcaaatatcaacgggcagtccaattcgtcaaccatccagtcaaattccgctcattagcggacgaaatccttcacctcaaacaggtgaaggatttttttcatacaaaaaaacctccttatgagaaaaggaggtttttaacctttgttcatggcttcatatttatgatattgtttcttcatctccgtcatcaattcatccagctgaataaacgagtgaaattgagtcggtttcgttaaaataaacgccattcgctccgcccaattgatcggttcggcgggaaaatgctttgtttcaagcacagtccagtcgagtgatgtaacccgctcccctgccgtccagtgaaaagcggcaatcagacaggcaattcccttcagcatgtcattttgatcacatctcgattttcttgtttgaaaaacgggaagcagcgtttctttcgtttcattccaaatctgaaacagaaacgggacatattcgcccctttccctccatggctgcacggttggctgaccgctgaaatccatatacagcggatggcggcgcagcgccgttttgatctcgaggctttccaagtccgtaaggctgcgcaggtatgtttcatagcctgccagaatgtcaatcgccgtcaccgtttcaccagcccttttttgtcacgcttctgcccttctctgcatagcggaagcaaaggacattccgcacagcggggagattgcgctttacaatgatacctgccgaaaaatattaatctgtgatgcgtaacagaccaatcctctttcggcacttttttcattaatgttttctctacttccaaaacagagtccttccagcggcagataccgagccgtttagagacccgctccacatgagtgtctactgcgatcgcaggtacgccgaaagcaacagacacgaccacatttgccgttttccgtccgacacccggcagattcacaagctcatcccggtctttcggcacttctccgccgtactcttcgatgatcattttgctcagcttttgaatatttttggctttattacggtacaggccgattgatttaatatcttgctggagttcttccagcgatacggcaagataatcttcgggccgtttatatttttgaaatagcgtttttgtcactctgttgacgagagcatccgtacattgcgcggataatgcgactgccacaaccaattcgaaaggatttgaatggacaagttcacattctgcgtgcggaaacatatcgccgattttttcaagacaatattcaatttgctttaaatttaacacgtttctccccttctcatgttattgttccagccaattgtaaaaaggcacctgcctcgtatactctttttgcggatcattttgttttgtttgaacacgccggaatttttggctgtgcgcctttgcctgctcaaccgttttgaagccgttctttttccattcaaataaaatccggtcaatatagcgaaaactgagtttccccgataaaacggcttcttttaaggcgtgtttaatcagaatcgcatcatgctgatcctggtcctgccatatggccagcgtctcgcattcaagcggcgacagcggtcttccaaactcttcttcaaagatggtatacaggcttttttgttctctttctgacgttctttcctgcgtttcgttttgtgaatgctgcatgtaatcatacagcttcgcccataacggctgcagagaatatttttcaaactttatgccgttatggtcttcacattcttcaataaacagaaaacctttttgaataaacattctcaggcagcttgtacattcttcagcagagatggacatgcctgactgaagttcaaacggcgtcggaaaataagagcccttttccaaatgcattttaatcttcaaaagcaggatcaattcggtttcattcagcccgagctgccggtaatgtgtcagcagcaggttgggaatgcttgaaatgccgagttcctgcatatctataaattgctgttttttcatccttacacctcttactgtaaaaggttatctccgggagctttcccctttacttagaaaaagtctcccttgcaggagacttcgttttttaaaactattacggatacagacggttcagaagtctcgggaacggaatcgtttcacgcacgtgaggcgctccgctgatccaagccactgtccgctcaagtccgaggccgaagccggagtgcggaacagaaccgtattgtctgagttcagcataccatttgtaagcatctgaatccagaccgtgttcttttaatctttcttccaataaatccatatcatgaacgcgttctgaaccgccgatgatttccccgtagccttccggagcgattaagtcggcacataacacgacatcgtcacgatctttggcaggctgcatataaaacggttttaatgacgtcgggtaatgagtgataaacaccggtttgtcatagctttctgcgatcgctgtttcatgcggcgcaccgaagtcatctccccactcaatatcgtcaaagcctttttctttcaggaattcgatcgctttatcgtacgtaatgcgcgggaatggcgctttgatttgttcaagcttcgatgtgtctctacctaatgtgttcagctcgatcttacaatgttccagcacactttgtacgatgtatgcaacataattctcctgaacttcaaggttttcttgaaattcaacaaatgccatttcaggctcaatcatccagaattcgatgagatggcgtttcgttttcgatttttccgctctgaacgtcggtccgaaagagaatacttttccgagcgccattgcagctgcttccatatacagctggccgctttgagacaagaaggcgtcttcatcaaaatatttcgtcgcgaacagctcagtcgtgccttccggagcgcttcccgtcaaaatcggcggatcaactttcacgaagccttctttgttgaaaaattcataagtcgcacggatgatttcgttgcggattttcataattgcgtgctggcgtttcgaacggagccataaatgtctgtgatccattaaaaattccgtaccgtgctctttaggcgtaatcggataatcagtcgcttcgtgaatgacttcaatggatgtaacagcaagctcatagccaagcggtgaacgctcgtcctctttcacaattccttttacataaagtgacgtttcctgcgtcactgattttgcgatttggaagatgtcttcttctacttcagctttgacgacaactccctgaatgaagccggtaccgtctctcagctgtaaaaatgcgattttaccgcttgagcgtttattagcgacccaagctccaatcgttacttcctcgcctgtgtgtttatacacttggttgattgttgttttcaaactctttccctccagaacaagaaagacattcaggaatctgcctgaatctcttttttcatcactttattatacccgttctactctaacggggtcaatgcaagtgaaaagcggctttaaaagccgctttttcagaatcagctgtgtttttccgtgaagcggcggattctttcgaccgcttcttctaaaagatcgagtgacgttgcgtaagataagcggacgttgtccggtgaaccgaaacccgagcccggcacgatggcgactttttcttcttccagaagcgccttgacgtattcatcgacatctttgaatccacagttttctgcggccgctttggcgttagggaacaagtaaaacgccccttcaggtttgacacaggtgaatccgggaatctcactgagctgagcgtaaatggtgttcagtctgtgctcaaatgcctgtctcatctcttccagcggctcagccggaccgttataggccgcaatagcgccgtattgagcgatagacgtcggatttgatgtgctgtggctcgcaaggctcgtcatcgctttaataatcgtctccgaacccgccgcatagccgatcctccagcccgtcatgctgtgagatttcgacacgccgttaatgatgatcgtctgctctttcaattcatctgaaagctgtgcgattgagacgtgtttttttcctccgtatgtaagcttctcataaatctcgtcggaaacgatcagaatgccatgctccagacacacttttccgagttccgcaagctcttctttcgtatacataacacctgtcgggttgctcggtgaattgataatgagcgcttttgttttctcggtgatagcctgcttcagctgctccggtgaaattttaaactgattggattccagcccttctgcatagacgggacgcccccctgccagtttcacctgctcagggtagctgacccagtaaggagtcggtataatcacttcgtccccttcatcaagaataacctgaaataatgtatacagagcgtgtttcgctccggtgcagacaatgatttctgacggcttatattcaatcccctggtcgtttttgaatttttttgcgatactgtctttcagcgccggcagaccgcctgaaggcgtatatttcgtatggccttcattcatggaacgcaccgcggcatctataatgtgctgaggcgtattaaaatccggttctcctgctccgaggccgatgacatcatggccttctgctttcagctctttcgcttttgcagtaattgcaagtgttgcagacggtgttaatgcggatactctttttgccaatttcaacttgaactccccctaatacgtctcacggtgtgatgtttttgagaatcttgccgcttgtaaagtccacataactaaagctatactgcccgcttttgttgatataggtcacttcccataacggaacattgttttctctcgccgggtgaacgccattcagcttggaaacaagcccttcgtcccggacgatcttggcagccttgccgcttgaaatgccgtcactggctttttttgagagaatttttgcttttttgtcggccggaacccatacatacatatcttttccatgtttatccgttccggtaacaacataatatttctgtttgccgacaaaggtctccactttctcagcatctgtcaaatccgttttttctttagcggctgcggcagctgtttcgtggccttcttctttttgggccattgcagatttaaaaatgctggccgaaaataaaagaactgctaaaaaaataataccaaatacggctgtaaatattaatgctttttttctcatctttttcacctatgtgcgataaatggtgaagaccgcttcattttgattttcttcgtcgagcgcaagcccgaacatcagattgtcccgtttcaaagtccggtttaatgtatcgacgattttatataaatcatctgaatgctccacattaatcgttgacagaatttcaattttgctttccatttttataccctccatcggtcgaacaaattttgttagtcataacgggatgcgcccgcggcataataaaatcacaaggcggcatgaacccgcttttactataaaaacaattcctcatcccacaccacgaaagccgcgattatgcggcttttattccgtttggctgacataagccccgagttcggcatccgtcagctccaaaagggatgaagtcgggagcgcttcaagaaacagccgtccgtatcccgccgtctttacacgctgatctaaaagaacgattgttcccttgtctcccgccgtacggagaaggcgcccgaccccctgtctgaacgttaacacggcctcaggcagggaaatcgtctgaaacggatttttcccctgcttcttggcaaattcgcattttgcggcatgaagcggattgtcaggcgccctgaaaggaagtcttgcgatcatgacggttgacaattcatcccccggaaaatcaacgccttcccagaaatgatttgtcccgagtaaaatcgcccggcttgccgttttaaaggttttcattaatttaccgggactcccgcccgaaataccttgggcgagaagctgaatgcctgatatctccatactgagtttcagttcctgatacacttttttcagcatatcatgagacgtaaacaggacaaggatcttcggctgttttccctttgacatgatttctgcatacttggcaatatgctcaatgacttcccgctctccgtcatatttaacggatttcatctctttcggaatgatgacgttcatctgatcatcgtaagaaaaaggagacgggatgcttttggtgcgcggataaaaatccgcaagtccgagcctttcaatcataaattgaaaagaatgctccaccattaaggtcgctgatgtgagcacaacgctttttttgcgggcgaaaaactggtctgccagcatttcaccgggctccaaaggctgcgcatagatgctgacggcattttttgcgcccttcgcgtcaatttcaacccaaacggcttctttctcatcattttcaaacagcagcctgctgaacgtatcgcgatattctttcagccccctgatacactttacatattcggccgctaaaaaagccgctccgcttttcatctgatcaagcttttgatgtaacagtttctcttgtactgaaaacatgtcaagcagctgatccagcatcgcacaaagccgctccgctccgtccgttatcatgtgaaaccctttatcctggcttttatgattgagactatagacgagacggttcgaatcgtctttaggttttcttcgtttgacaaaagaatgcactgaactgaaaaatgcgtcgctttccgattgaatatgcttcatccactcatcggcgtcaaaaaaactttccgccggcagttcatacgtataaaacagttttctcatccgctttaacagtccgtgttcctttaaggttccgattcggctgagctttgtgtgcagtccgatgtatgaagctctcttccccaggtgctcgctggcagcgcgttcgaaatgatgcgcttcatcaatgatgaccgttccgctagcaggcagttttttcgtttcactgctttgatctgaaaacagcaaagcatggtttgtgataatcagatctgcggcctgcgccttttctttagcccgttcataaaacccggcagccgagtccttcccttttttaaaaaaagaattctcatcgtaagccatgcgctcccacagcaatctgccgcctgatggaagattcagctcagcggcgtcgcccgtttcagtctccgtcagccagacgagaagctgcgctttcgtcaaaaccgcatcatagttgtcatcttcctcatgcagaatatgttcaaacttaggcaggcacagataatgtgatttcccttttaaaatagcggctttgaccggccaaggaaacatacgctccaaaagcggaagatctttagacatgatctgctgctgcagaagagtagagtacgtgctgataatcacgggagtttgctccgctttggcaaataaaacagccggaacgagataaccgatcgtttttccgatgccgggtgccgcttcaatcagcgcatgctcccgattgcggaaggcgcctagcacttcatccatcatcgaaagctgccctttccgcttttcatagcgggggatgatatcggataagatctgttctttttcttcgttccacttttcaaggtcaatggccgcattcaccggacgggaaaccggaatgtgatcgggctctttaattgaaaaagaggcgtatggaatgcagctcttttcttccgccggcctgctttcatgtataaaagaatccaaaagcagcgtcaaatcgctgataaaatgctgtgaaagccttctaagctgctttaatgtcggtaaaggcaaatgtttcagtttatgtaaaatgtctaaaaagaccagtcccgtaacctccgcatcgctgtctgcgcggtgaggtcggtcatgaacaatattcagctccgcgcacaactcaccgagcttatatccttcaaaccccgggaaaacaatacgtgaaagctcaaccgtatcaagcacttcacaatccggcagctcatagcccgcttcgctcagttcatgccggacaaatccgaggtcgaaatgaatattgtgggcaacaaaatacgcgccgtcaagcagatgaaaaatctcctccgcgaccgcttcaaacggcagttcattttcaaccattccggacgaaattccggtcagctgttcaataaacggcgggatggcctgattcggattgatatattttgaaaaccgctcagttatttgtccattttcaatgacaaccgctgcgatttgaatgattttatcgccctttttcggcgaatttcctgttgtttcgacatctatgacaacgaaccgttgtttgttcattaaaatggacacctcaattcttgcatacgagaaaagtgtaacacgttttgttgagaaatggagcggaaaaacagcttttgcccctaaatcttaaaagaaaacccccatgaagggggctcttttacaaaatcgtgtgtgccggctcctgacccagcatctgctcgattttattctgatcatccagaacggccaccttcggctgatggctttttacttcctgatcagacatcatttgataagaaataataatgactttatctccttcttggacgagacgggcggctgctccgtttaaacagatgacgccgctcccccgcttaccgggaataatatacgtttcaagtctcgctccgttattattattcacaatctgaactttttcattagcgagcattccgactgcatctaaaagatcttcatcaatcgtaatgctgccgacatagtttaaattggcttccgtcacggtagcgcggtgcagttttcctgccatcatagtgcggtacatattatgatctctcccattcatcaatatcaataatgatattatcaatcagtctggctttagaaaattggacggcacaggccagaatgaccttgccgtttaatgttttaagcggagtcagctccggataagcgtacagttcggcataatcaatgacgccgcttgtgttttcgatgatatcggtgacggtttttataacggtttccggatttctttcaccgtctctgatccgttcggcaccttgctgcaatgctttatagatcatcggcgcttctttgcgttcctgctcagtcagatagacgttgcgagagcttttggcaagtccgtcttcttctctgaccgtgtccactgcaaccaattcgatatccataaagaaatcctcaatcaatccgtccacaaccgctgcctgctgggcatctttcaggccgaagtaggcgcgggtcggtttaacgagattgaaaaacttcgtcagcacagtggccactccgtcaaaatggccgacgcgggaggcgccgcacaacacgtcagttctccttttcacttgcacggcaacattttgctcgcctttgtacatatcacttggagacggcgtaaacaaaacatctgcccccgcctgttctgcaagccgggcatcgcgctttaaatctcgcggatatgcttcgtaatcctcgcccggtccgaattgagtcggattgacaaagatgctcatcacgacaatatcgttttctttgcttgctttttcaaccagcgtcagatgtccttcatgaagaaaacccattgtcgggacgaatccgatcgtccggccttctgagcggtattgtgcaatcaattctttcagctgttgagtttctgtcagttgtttcatcgcttactttcctccgtacaagccttgcagcacagtttggtttatctgaaaggaatgcttttcttccgggaaaacccgttctttcacatcacggacataacagctgagggccgactcaatcgtgccgtcgattttggcgtattgcttcacgaacttcggtgttctgtccacgccgtggccgacgacgtcatgatagacaaggacttggccgtccgcttttgaaccggctccgattccgatgacgggaatggatacttcttcttttattttagcagtcagttcagcaggcacgcattcaagcacgagcatcatcgctcccgcctgctcgcatttgatgctgtcttcaatgagctttttcgcgctttgctcatcttttccctgtactttatatccgcctaatacgccgacagactgcggtgtgaggcctaaatggctgacgacgggaattccgccgagagtcagcgcgcggatggattcgaaaacgccgtctccgccttccagctttaacgcgtccgcgccgctttcctgaataatggccgcggcgtttttcaatgtatcctcttttgaaaggtggtaagacataaacggcatgtcagttacgataaacgtatttttcgcaccgcgttttaccgcttttgtatggtgaatcatgtcactgaccgttacgccgactgttgaatcgagtccgagcacgaccattccgagcgaatccccgactaaaatcatgtcgactcccgcctgttccgcaagctttgcctgcggataatcgtaagcggtcagcatcacgatcggctctccgttttccttcattttcataaaatccagttttgttttcattctgtttctcctcctctaaacggtgaggagatgagccgccaattcttcgcaagcaaaaaagccttctgtaaaataagaaggattcccacttgtttaacgttcggcgaatgtcatccctctgtcccagtccttttttggatcaaggcagacttttcgtaatctctgttctgctgatcgggtgcagttcattatgatactgcccataggaagtataccaaattcacgaggcttgtaccaactaagattaattgagctcaatatcggcagaatagatcttctttataccatctctcgtttccaagagaagaactccctcatcatcaatgccgagcgatttcccgtaaaacgtcccttgcagcgttctcgctctgagctcgttccccagtccgaccgcatagctttcccatagcagcttgatcggtgtaaagccgtggttcaagtaatcctgatagcgtttttcaaaagtcagcagaatctcttgtatcagacccgctctgtcaattttttcgccggcttccatgctcaggctcgtcgcaatgtcctgaagctcgccgggaaaatcggtttcctgctggttcacgttgatcccgatcccgagaataaccgaacggacacggtcttcttctgcctgcagctcagttaaaatcccgacggcttttttgccgtgaatcattaaatcattcggccatttaatggcgggctgtacacctgtaaaagcctcgatggcctgtacgatcgcaacggcagataacagggtgagctgcggcgttttttgcaaaggaacgtcgggtctcagaatgaggctcatccaaatcccgtttccctcctgtgaatgccatactctggccattcttcctctgcctgccgtttgtttatcggcgactacgagcgtcccttccggcgcgccgtcattggcaagttcatgagcggttttttgggtggacggcaggacgtcccggtaatgaagctgtttgcccaaaacctctgttttcagcccgaaacggatttcggattcactgagtttccccggttttttaatgagcctgtacccttttcgtctgaccgcctcaacctcatagccctctttgcggagttcctctatatgtttccaaacggcggttctcgagcagccgagcgcgtcacttattttctgcccggagataaagccgtcacccgcctcagaaaacaaatcaattaatcgggttcttaatgttgatcccatgatgcgagccactcctttatgtcatgttttcggttagggagcttccctgccaataccgcttcttcgatccggcgaagttcttcggccacccatttacccgcgcggcggtttctgagctccatcagatcagcacctgaaatgtcgaggtctcgaaggcttttgatcggcagctgctcatacaggctctgaacctctttcagcttttgttcatcaatcgtcttatgctttttcagcatcccgattttaacggctgaaaacagcgcctctcccgcccggtacatcgcttccgcttccagctgcgccggataaacgcttatgatctgcaccgctttttttatgacttttcccggcagtttccattgttttaaaaacgcctcggcgcttttcggacaaagaccgagaaacaataacagcgctgcccagcgttcttcgcgtgcatctaaagaagaaaacggaaatccgcttgcttccagcatttgctgctcataaccggaaaggccgggcagctcttgtatcagacctgtctgcaccatcgtttgaattgcttcctgtgagaaagcgccctgcagcagcttttcaaactcgacggtctttcgttctactgatacatgtgccaaaagctccctgtcttttatgacggcctctcttgtttctttttctaacagaaagccgagctgactcataaagcggacggctctcatcatccgcagagcgtcttcccgaaaacggtcttcaggattacccaccgtacggatcagcttttgtccgatatcatgtgcgcctccgaaataatcaagcagctctccttcggcagacatcgccatcgcgttaatcgttaagtctctccgctttaagtcttctgataaagaagtaatgaaccgcacagcttcagggcgccggtagtccttatattctgattcggcacgaaaagtggtgacttcataggtttcatcttcccacaggacgatgacggtgccgtgctcttttcctacatcgacagtccgcttaaagagacgctccacctcattcggcgaagcgctggttgcgatgtccacatcacctatttttcgtttcatatagctgtctctgacggctcccccgacaaagtacgcctgatggcccgccttcatcaggtgatgaaggatggggagggctttgacaaattcctgttccataagatcactccggtcctgccaattcgtcataaatccgttcatactgactgacgattctttgcgaagaaaaggcggtctccaccattttcagcgcatgatcagtcaatcgtttgctgagctgtttatcttctaaaacggcaagcgctttttcagatgccgcctgaatatcgccgacttccaccagaaaaccgcttacttgatctttaatcacttccggtattccgccgatatttgttccgatgcacggcacgccgcaggccatcgcctccagaagtacgagtccgaaactttctttttcagacagaagaagcttaagatcgctgatggaatacagctcttccaccctgtcctgatttccgaggagcagcacttgatcctgcagaccgtatttttcgactagctgccaagcgacgcacttttccggcccgtcgccgacaagcaggagcttcgcctttgtgttggctgcgatattacggaaaacgcggatgacatctttaacacgttttacctttctgaagttcgagacatggatgacgactttttcatccggcaaaatgccatgtttctcttttatactctctgtatttttcttaagataaacacgttcatcaataaagttgtagatggtctcaatttttttatccggcttgattaagtcatatgtttctccggcaagcgcggttgataccgccgtcactctgtcggacgcttcgatggcaaaacggattaaatcttttaatgacggatcgtatcctaaaacggtgatgtccgtaccgtgaagcgtcgtcacgatgccgatgtcacgcttgagcatctgtttggcgagataagcgcataccgcatgcggcagcgcataatgcgcgtgaatgatgtcaagattttccctcgcggcaacctcggcaattttactcgccagcgcaaggtcataaggcggatatttaaataccgcgtattggttgacttccacctcatgaaaatgaatattcggatgatatgtatttaatctgaacgggatgcttgatgtgatgaaatgaacctggtgccctttttccgcaagcagcttgccgagttccgtcgcaataatacccgagcctccgacactcgggtagcatgtaatccctatttttaatggtctcattgtccgcccccaaaaacatcatcattcaaaacgggaagctgttttgaaaagaagccttcggcataccccgtcccggcttctttgccatacagtttttcccgcgcttccaccatttcgatataaccgttggtcagcggtgtgttcactgactgcgccgtaggaataaactggctttgataggcgtgcaggctttcttttttcagatcgatggtttccgttatgtcgattacaaagtccggacggtgaaacccgttgatcatataatagtatacgcgctgagccttatgagccggcagttcctggtgatctctgtatttatgaattcccgccgagaacaccgcttcttcgaccaaagccgccgcattgccgtggtcaggatggcggtctttcggataaggcatgaaaacggttttcggccggcaggctctgatgacactgacaatccggcggatgccgtcctcacttttcaaaagcccgcggtcgggaagcgtaagctggattctctcttttacgccgagaattcgggccgcctttgccgcttcttcttttcttatccctaccgttccgttggatgatagttcggcctcggtcaaatcgcatatcaccgcggtttttccttgagccgtaaattttgcgatcgtgccgcccataccgatctcgacatcatcactatgggcgccgaacgccagaatatcaacgtgttcagacattcggctctcctccgcgcacaagattgcggaaatcaaatgccccgccgtccagcgtccggacgaggatttccgctgtccccatatttgtggcgagcgggatcgcgtatacgtcacacagccggatcagcgccgagacatccggttcatgaggctgcgcagttaacggatcgcgcagaaaaatgacgagatccagggcatttgccgcaatcaatgcgccgatttgctgatccccgccgagcgggccggattgaaaacgttcaacagacaatccggtcgcttcctggattttcaggcctgtcgtacctgtcgcgtataactcatgatggctcagtatatctttatatgcggtcgtaaactgaaccatatcctgcttttttttatcgtgagcaatcaaagcgattttcatttgatgttctcccccttgccgattcagtcgataatattttcgagtccgtatacaagctggtcgattttcatcacttgctccactgacagcttcactcctgacataaaggaagcccggttataggagtcatggcgcagtttcagcgtctggccgtccatgccgaacatgacttcctggtgggcgataaggcccggcagacgcacgctgtgaaggcggatgccgtttaattcagcaccgcgggcgcccggcagaatttctttttcatcaggatggccctgctgcttttctgtacggacgcttgagatcatttccgctgttttcagcgccgttccgctcggggcatccagcttttgatcatgatgaagttcaatgatttctacatcttcaaaatagttggcggccatttgtgagaacttcatcatcagcaccgcgcccaatgcaaagttcggagcgatgatggcgccgattcctttttcttcagtcaaggcttgaagctcctctaaatccgcttcagaaaatccggtcgttcccacaacggggcggacgccgtgttcaagagcggctttcgtatgttttttgccgatttcaggcgttgtcaaatcgatcagcacatccggttttgtttcttggaaacatgcgcggatatccgtataaataagagcgtctgaatcagctgacatcacttcccgcaatgtttgctgatcgtatgtatggtcaatagcgccgacaagctcaaaatgaggcgtgcggacggcaagttttacggcctcctggcccattctgcctctcggtcctgcaatgacgactttaatggtttcatttgacatggtttctcctactttccttcttcttttctagtccagcggtctttatcacgtgtattaaatttatgcatgacgcggttatgagcttccaccaatgaaatatcaagggagttggcgaggcagatcaggacgaacagcacatcgcccatttcctcttccatgcttttctcattttccgtcgttttcttcggcttttccccataataatggttgacttctcttgcaagttcgcccagttcttccgtgagacgggccatcatggcaagcgggctgaaatagccttctttgaattggccgatatattcatcgacctcagcttgtaagtctttcatcgttttgtcactcactgtgcgaatacctcctgtcatctcttccatgttagctaattcaagtacatttgacaaatgttaaaaacggcagtttgctgttttcttttgtatccactataatatttacgcaatcttatggaaggaaaaggggtttgatgcaatgcttggagaaatcagaatcaaaaacatttgctttattttaatcggcgccgctgttttttcattcggactggttcactttaatatgcagaacaatttggcggaaggcggatttaccggcattacgctgcttttatatgcgttattccacatcagcccttctatttccaacctggtattgaacattcctatctttttcatcggctggcgtatgctcggccggacgatgtttgtctataccctgatcggcaccgtctctctttccgtttttctgagtgtttttcagcgctacgaaattcatatgccgctgtcgcatgatttagcgctggccgccttattcgccggtgtatttatcggcgcgggtctcggcattatttttaaatacggcggcacgacgggcggggtcgatatcatcgccaggctgatcaacaaatttttcggaatcccgatgggccggacgatgtttgcctttgacgcctgtgtcattttgctttctttgtttacgtatctttcttacaaggaagcgatgtacacgcttgtagccgtttttgtcgctgcgagattgattgattttatccaggaaggcggctatgccgcaaaaggggcaacgattatttcttcgaaaaacgatttgatccagcaaaaaatcattgaagagatggagcgcggcgtcactgttttaaaaggacagggatcatatacaaaagaagacagggacgttctttactgcgtcgttccgaaaaacgaaattgtgcttttgaaaagcgtcatcacttccgttgacccgcacgcctttgttgcagtaagcgacgttcatgatgtgctcggcgaaggatttacgcttgatgaaaataaaaatccgatcagacgataataaaaaggcggcttttgccgcctttactgtttgtgtttccatttgacaaccggtgattttttcttttttaatcggcgggcgaattccggactgacattgagcgtctgctcgacgaagcgctgcggcgtcagtgccagccattggtttaaagagacatcttcaaaacggtcgcttttgaaaatttccagaaagcgaagcacggtgtcaccggtattctgaacataatgtcccattgcaaaaggaacatatcctacgtcacctgcttgatagttaaatgtccgcgctcttccctccgccgcaaacaccgtcattttcgcttctcctgaaagataatactgccactcgtccgtattcggatgccaatgcaattctctcatgcctccgggttcgacttccacgagagctgcggcaatcgtttttgacaccttaaacgtttttgaatcgacaatctttactcttcccccgctggtaacaaggggctcctgccgggaaagcttgtagctgaacggctccaaaacggtgccttccggggaagaaactgctgccttttcaatcgggggaggcggttccagctggaacatgtaacgctctttcttgtgaatgtaggccaagtcatatccgggaacaccgaagttcgcctccagcacgctgcgcggggtatgggcaaaccagtccgttactgaaaaggtgctgttttctgaaaaagagccgtcatcaaagacgagcaaaaactcactgccctgctctaatccttgaatggaatgaggaatgccggaaggaaaataccacaggtccccttcacttacgttgtcaataaaattccttccattttgatcgaccgcagttaaacggactcctccgttaatcacatatccccattcggcttctttatgccaatgaagctcccgcacagctcccggcttcagcctcatgttcaccgccgcgatgtttttggataccggcagttccctgaccgtcacctctctggaccatccgccgtcttcaagcctcatatgcgtatcagaaaatgagaatttcaagttttgaaccgttcctgcatccgttgaaggcggaacgagcatgtcaggattctgaaagtcacgcgcgaggtttcgcggtccttcgtcagtcgccccttttctgcctctgatcggctgcggaaggtgttttgaagccaattgctggatgagttttttcactgccttagctcctttacagcaatttgtgtttatttagacttaggatactcacgctttttctctttctttttttccgctctgtattttcggtagccgacatatgtcagcgcagtaataatgataccgcctgttgtcagaatgacccagagcagcgaagggtcagcgtcatcccgctccaccttgtcaaaaacccgctttaaatcctgctgcaggagcgtcagacgctcaagctttgttccttttgtcatctgctgaaacccgtcctgctcaatcacctcgatatgtttcgccaccgtatcaagctggccggccgacacatccattgtcaggctgggataaattaaatcatataatgatataaattcattccacttttcattgaaattttcacttccgtttccgctgacatcttcttttaaggcgctgaatgtcgccataatcggtctttcaagcgaaccccacagcggatcggagtggtcttccatcgcatccattaccaacctgaactgggcggctgcccggattttttcggtatctgaggcgtctgcctgtttcagaacgcgcactaaatcattgaaacccagagtcacctgcctgacttcggcgccgctcagtgagtttacgtgtgtcatttttttcttaaagtagccaagcacttgcagagcctcatcatactgcgaatgccgcgtcatttggaaaacggtatccgaaaggtcgttcagttccttgagaccgccctcatcttcagctttggcagttgtgatgaaacacataagagcaagtaaaagacagatcgtcagctttcgtttcatagaggtccctcccactccttctctttacagaatatgaggagcgggacaaggttagaccaagattctatcagtgtaagtcaagctttacccgtcttttagaaatcaccaaatagtatgcaaggccgagtgaaaatatgctcagccagaatgtagcatagccgatctcttgcatatagtcattgagcattgagtagcggggcatcatgccgaaaagataatcaatgacatcattatgaagcgtccaaacagcggcaacggcaagatgccataaccggaaccgaaaatacgggctgtataaaacgccttgaacggccatggcaaaatgtgaagcaatcagcatgtacccttcccaaggcatctgccccattttgaccagcacaaagacattcattccgaccgcccacatcccgtattttacaagggttacaagagccagcgcttcaaacagcggcgcgtttcttcccatgagaaatgccagaagcacgaacaggaagaaaaacgtcgccgtcgggctgtcaggcacaaatatcagaaatcggaacggcgtgtctgcaagctgaggcacataccaataatagccgtacaccgtaccgataaaattaacggcaagaacaagcagaagcatgccgcgcaaccctaaaagataagaaatccacctcataccatcaactctcagtccgtaaaaagtatgtatcatgcaaaaaaagctgacatccggtcagctcttttcataaaagtatatcctgctattgtctacttcacaatacgttatttcgctgtcgtttcagaaatgaacttcgccagctgatcaagctgtttgtcattccctttaaaaataccggctggcatctgccctttccctttgacggcgatttttttaatttcttccgggctcagcccgttatcgaccagggacggaccggcgcttccgccttgaagattatccccgtgacaggaaatacagccttgttctttaaataccttataaccgtctgattcagtatcaatggcggcttcttttttgattttcccttgctcctccgccttcgcccagtcatgcgtcgcgactgactgccacgttaaaaagaccgtagcgcaaagcgccaaaagcatcatgccgaccgcaaccggacgcttccacggccttctttcagaccccctgtcgagaaacggagccaaaagcagcgacccgaaggcaagacccggtataatcatcgcgccgataacggtgtagctccctgcggcatattcatattttaatagctggtataaaaatagaaaataccaatcaggcagcggaatataccctgtatccgtcgggtccgccacccgttccaaaggcggctcgtgcacaatcgttaaaacgagaaatccgacgaggaaaacggccccgaccatccattctttcagcaggaagttcggccaaaacgcctctgtctttccaggatactctgaatagtctttcggtatattcggttttttttcagccggtatccttgaatctcctacaaacttcattcctttcccccggtgcatgtcatcccctcccttttatatcagatttgtattaaagcggtcctgaaattccctgcttgcggatcatgacaaagtgggcgcccatgagcgcaaacaaagcggcagggagaaaaaatacgtgaatcgcaaaaaatctcgtcagcgtttgggcgccgacaatatcgtggtggccggcaagaagagttttcacctgcgctccgatcaatggcgtcgcctccgcaatctgaagacctacctttgtcgcaaacagcgccttcatatcccatggaagcagataccctgtaaaaccgagaccgagcatcacaaaaaagatcagaacaccgacgatccagttcaattcccgaggctttttataagctccctgaaagaaaacccgcagcgtatgtaaaaacatcatcacaatgactaaacttgcaccccaatggtgcataccccttacaatctgcccgaaagcgacttcattctgcaaataatacacagattcccacgcgttttttatatccggcacataatacatcgttaaaaacatcccggacaacacttggataacggttacaaaaaacgtcaaaccgccgaaacaatagacaaaagccgagaaatggtgagcgggatttacatgttccggcacttcatggtcggcgatatcccgccacatcggcgtaatatcgagacgttcatccacccagtcataaattttgttcagcatgtcacccttcccccctaggctttgcttttccaagatacaaaaagccgtcctttactttttgctcataacggtcaagaggcgcgagcggcggcgtgcccggaacgttcgtgccgtctttttcatacagcccgtaatggcagggacaaaagaacttgttcggatttttaggatcattgttccagtttacggtgcagcccaaatgcttacagatcggagaaagcgctataatttcatccccatgcttgtaaacccaggctgacctggattcttccgattcgtaccaggcgtcgacttgatgaattttaaagtcaaaccgcttcggctccttcgtcagctcatccacactgacaacctgcaccattttttgatctcccgtcggttttaataccgggtccagcgcaaaacggaccatgggcataagcgcactggcggccataaatccccccacgccggtgagcgcatagtttaaaaattgtcttcttgatatatcttgttttccgcccatctcttccccccctaaagattgaccaaaaattaactaaaatagaaaataattctgagatttgacaccctcataatatatgaatctttcagcaaggtcaacagaggcaaaacgggtgttttgcgggatgcctggtgttttttaagaattgttccacttctgtaacaaaacgttcaaaatttctccgcacttgtcatccgcaatttttctctttaaagagtctttcatatgttcaaacggaacggcaggtatgtatatgacatcagaacctatttcagaatccttccatttttcgtctgccgtcaggaacaagacgtgccgaaagttggtcatcacctcgtctttgagtttttgaagcagggcgatttgtgattggtctatatcaacatatgtataagaggggaataaatatacccgtcccttcaattggcgctcaagctcttcagaaagcaattgggtgctttccccctgttcaacggcctcttttaagcctcctgaagatgttatggaaattaacggaatgacagcggtatcaatgtaatccgcagattgtaaataggcatcggcatcagcggccctccatctcatgtctcgttcctcctctttacgcaacaagccttgcatattctgcaaggctgtcatttatgtgagctgattcaattggcgggaaagcttttcaaatgtttctttgtcgtggcggtccagcgcctcgtcgatatctttaagcagcttttcccgctggaaagtggaaatggcatgttctaatattttttcggccatcccctgatcctgtttattttcaaacaggtctttcggcagatgcggatttgattcaagaacagcggcatattccggtgagctgtaggccgaacggaaattcagctggataaataaatcctgctgtttatttaaccggatgtcgtgaaaagatttttccgcgtccgtagtcatgacattttctttgtaaaacctaaacggcacctcatcaacgcaatgagtagacatgataatgcctcgcgggcaaaattcggcttgttctacaaaatggactttttccattaatgaatcatgactcattaaataatttaaaatccagacgcactcccggcgtttaagctgataatgatttaaaaaccaacggataaaatcctttttttcattgacagaaacaggggtctgcatgtaattccctcctctatcgatcgtataatctgacatcacttatacattcagcaagcatggtccaaaatcctgcttatcttaaaaattcatcctctatccgtaagattgtttcttcaagctcttcgtttgttccatccattgaaagcacttgttttaaaagcggcagcgcttctttctggagaccctcttccaataagaagtgagcgtattcatataagaaatcccgatcatcctgataatggagatacgcagcttcgaagctttttttcgctttagcgtattgctcaaggcctgtataagcacccgccaaataccaattgtatttcggatcttcttctccgtagccgcggacttcctgaatcagatcaataatctcttcaaagctttcttctttatgatagacggctaaaagcgtatggagcgcttccacgtaacccggatcgagcgccagcgcttcctgaagaagctttttgccttcctcttcgttgccgagctttaacgccattttcgccgcatagagaaaaagctctttattgtattcatcgtaagtaataccttctttagcggtttttaatgcatcttcatacatgccttctgcctcgtagctttttgcaagcggcatataaagcgatgaataggaaggatcaagcccttttaaatcagacagctgcttgatggctgttttgaccattcccgcctgataggctgtgaacccgtacccgaaaatcgtattcggttctgtatgttctgccgccgctttttcataccatgaaatcgcttcctcaaattcacccgccgcgctcaatgactcagccagcctctgatgaacatttacgccgccgatttcgtgccgttcttttgccgtctcttcatagtaaggaacggcttttgcgtatgatccctgagtgaagtataattcccccagagcgaaatcaataacaggttcatcttgtaacatcgctttcgcctgtaacagcttttgctcacttacttcaaataagccctgcatctgatacagatcagccattaaaagaaggctttccgcgtaagacgggtcttccggagaaatcgtctccagcacctctagagctttttcttcttcatcaatatctattaacaattcggcgtaaaaattcgtcagctcagactcatccggataaaggtcatgcagatcactgatcagcgctaacgctttttcggcgtttccccattcatagtagagctgggctgcaatggctttgtcttcgtcatgaagctgcgtttcagcttttgaaagcactttgagtcccttttcggtttcacctgcttcaactaattttatggcttcttggatcaatgtattcaaatcagaccggtcctttcttttcctatacctcatcaaccaatgaaaagggtttttattcgggttattcttatcataattcagacagggcctgcccgcaaataagatgcttcacccggcattatagtttatcagaaaatgcttaagaggaaaacggcaaaaaaggggacggcatctttatacgcaaacagcgcaatttgttccggctgtttctgtaacgaaaacgcattccccctttctgttattttctgtttaagacaagctatgtcaaagcccaaagttttatgacacatgaagaaaaaagcccgaagaatctcttcaggcttttttggctaattgatctaaatgctcaaaaaatgtcggatatgagacatggattgcctcagtatcacggatgtcaatcggctcttctgtcaggcatgaagcgacaccgagcatcatgccgatgcggtggtcaccgtggcttgacacatcggctccgcccgcaagcgtttttttgccgtgtattttcatgccgtcttcagtcggttcaatgtctgcgccgattttccggagctctgatacgacggtgtcgatccggttcgtttccttcaccttcagctccgcagcgtctttaatgacagttgtgccttcagcctgcgttgccaaaagggcgataatcgggatctcgtcaattaaacggggaatgatttctccgccgatttctgccgctttcagatctgaagtttcaataaccaggtctccgtaaggctctgcgctgtccgcttctgaaggaatcacttcaagtgaagcccccatttgctttaagacatcaatcattcccgtgcgtgtcgggttcaggccgacgtttttcagcacaatccggctcccgggaacgacagcgcctgccgcgaggaaaaaggctgctgaagaaatatcgccgggcacgaaaatatcagccccccgaagcttctgaccgcccgttacggaggcgctcgtctccgtttccgcaagctcggcgccaaaagcgttcagcatccgttccgtatggtctcttgatttatgaggctcagtgacggtcgtcgttccttcagcctgcaatccggcaagcagcacggcggatttgatctgcgcgcttgcaacaggggagacgtaatcaatgcctttcaattgtccgcctcttacggataaaggcgtaaatcctccgtccgctcttccgtcaatcgcggctcccatctgttttaaaggctccgtcaccctcttcatcgggcgctttgcaatactttcgtcgcccgctaccgtactgtgaaatgggcgtccggctaaaatgccgagcatcaggcggatggtcgtgccggaatttccgacatcaagaaggctgtcaggctcacaaagtgcgtcaatgcccttcccgtatatcgttacatcacttccgttttgttcaatggagacacccatttttctgaagcaggcaatggtgctcagacaatcggctccgggcaaaaagttttttaccgttgtggttccttccgcaagcgctccgaacataacagaacggtgggagatggatttatcccccggaatatgaatttcaccgtttaaagacgtcactttttctcttttcaatgttttccacctcagtcagcgtaaaatgtgtcatatttggcgcgggattgaatgcaggtttccgcacgcttccggtcatcatcagtctggaaactgattctgagaattccgttaatatcttctcttgtttcgataatgcggatgttggtgatactgattttttcttctgccaatatcgccgtaatttccgaaatgacccccggatgatcgggaacatcgacataaaggtcataaaaggacgggatcgctcctttttgacggagcggcagaccgtcgcgataatctttcgcttttttaaaatatccgaacaggctgtccgcatcttcattttctacataagactcgatcgtgtcaatctcccgtttccattctttgaagcggtcaagcagtttatctttgttatgaagaagtatgtccctccacatcgccgggctgcttgaggcgatcctggtgatgtcccgaaaaccgccggctgcgaaacgtttcaaaaacggataatcttcttcagcatgatgagcctgatgtacgaggcttgcagcaacgatatgagggaaatggctgatgacgctcgttacgccgtcatgctcctcgggggtcatctccacaaagtgggcgtttgccgctttcaaaagttccttcagatgcgttactgactctttagaagttgattttccgggtgttaaaatataaaacgcattttcgaataaaaattctttcgcggcagcggccccggatttatgagatcccgccatcggatggccgccgacaaattgatagtgagccggaagcactttgtcggcgtagctgacgactttctgtttcgtgctgcccacatccgtaatcaggagttcatgggtgatgtctgatgcggccagcacatcgagcattttcagcgtttgggcgacaggcgtggcgataatgacaacagacgcttgctgcgccccttccgtaaatgagccggcccgctcgtcaataattccgagcttcagcgcggcagtgagctgttcttccgaaatatccataccgataatccgtttatgcggatgctcctttttgatggccaatgcgatcgatccgccaatcagcccgatccccgcaagcaatatagtatccttcatttcactcatttcctttttcaactattttaatagagcaaagaggtgatgcctgatcacctcttataatatttcagctaaaattgtgagaatttcctcattctgctctttcgtaccgaccgtaatccttaacgctgtcggaaatccgagcgcctgtcctgagcggacgatatatcctttttccaacagggcttggaacagttcatccgccgggcggttaaaatcaatgagcacaaagttggtttgtgaaggataacaagttaatccgtgagtttctgcaaaatcataatactgcttaaggcctgctttatttttctcgacgcattcctgaataaatgtctggtcatcaagcgctgccagtgccgaagcctgaccgattctgctcgtattgaacggctctctcgccggttcaatctggcggatcagtgcttcgtccgcaatgccgtatccgacgcgcagcgcggcaagtccgtacgctttagagaaggtgcggaggatcataacattcggatattgctttaaaagcggaatgctttctgggtaatcttccgccgtaacatactcgtagtaagcttcatcaagtacaacgagtatatgctcgggaactctgtttaaaaaggcaattagctcttgctcagaagtatatgtccccgtcggattattggggttgcatacccatatgactttcgtctcgccgtcaattgcttccagcatccggtccaaatcatgagcgccgtcactgcggagcggaacctcgcgcacctcagcgccttcaatcaccgcattgtgtctgtattgcgggaaagtcggggcggcggtaatcgtgtttgcctgatcatttaataaagaacggcagataatctgcacaagctcatcagagccgttgccgaaaatgatcgaagattcactgacctgcagatgctcactgagccgtgttctcaaagcggcactgtaaccgtcgggatacagcgcaagctgctcaatctcctgatgcagcgcatctttagcggcctgtgaacagccgaacggattttcgttagaagcgagttttactactttctcaagcccgtattccattttcacttcttctattggtttgcccggctgatacggtttcagctgccgcagctgttctttaatctgcaaatccagtcacctcattttacactgtacagtcgtccgaacgtctttgcgtattcttcaaattcaagaagcgcatcagctcttgtttcgggattcacaagctttgttttaagctcttcaacttttttgacaagcgcgctgccgacaacgacaccgtcagatatttcattcatcccgtcaacctgtttgcggtttgaaatgccaaaaccgaccgccaccggaacagggctgaattctttcaccttacgtatgaaagagtatacagacgggtcgaattcgctgcgtacgcccgtcactcctaaagaggatacacaatacacaaagccgcaggcctgttcagtaattattttcaaacggtcttcacttgtcggcgcaaccagagagatataagcgatgttcgcctttttgcatgtcatttgcaaaagggcgctttcctctaatggaaggtcgggtacaagcagaccgtctatgtcgttttcccgcagtaaagcgaaaaagtattctttttctaattgtaacacaggattataatacgtaaagaggataattggaatatgaacgccgttttttttcattttgccgccaagttcaattgcttttacgatattcattccgttttccagagcccgttttgaagcccgttgtatgacgggtccgtccgcaagcggatctgtgtaaggaacgccgatttcaagggcagaggcgcctgcattctgcaatgatattgccagctcaacagaaatgtcaggaagcggatcgccagccgtaataaaagggataaataatttttcagaatctcgcagattaaacatgtgtccccaccccgttttccaaaacattcatcagcgtatgaacatctttatctcctcttcccgacaaactgacgagaatgattttgtctttatccatgtcttttgccatttcaaacgcttttgccagagcgtgggcagattcaatagccggaagaataccttctgtttcagaaagcagacgtaacgcggcaatcgcttcatcgtctgtcacgctttcgtacgttacacggccgcttttatgcagataagcgtgctcagggccgatccccgggtaatcaaggcctgctgaaatggaatacggttcgataatctgcccgtattcatcttgtattaaataggtcattgaaccgtgaatcaccccgagcgtcccttttgcgatcgttgccgcatgcagcggcgtatcaattccttttccggcagcctcggcgccgatcagctcaatatcttcgtctaaaaaggcctgaaatatgcccatcgcattgcttccgccgccgacacatgcaacaaccttgtccgggagcgttccttcaacccggcggagctgttctttcgcttcctcgccgatgattttctgaaattcgcgaacgatatacggatacgggtgcggccccactacagaaccgataaggtagaaatgatcttcacaatgctggacccaatacctgatcgcctcattcgtcgcatctttcagcgtgccgttgccgcttgtgaccggcaccacttccgcgccgagcagtttcatccggaatacgttcaacgactggcgtgcaacgtcttcttcacccataaaaactgtacacttaaaaccgaattttgcggcggctgtcgcggcagccacaccgtgctgtcccgcaccggtttcggcgatgattttcgttttgcccatctttttggcaagcagaatctggcctaacgcattgttaattttatgagagccggtatggtttaaatcttctcttttcagatagattttcgcccctcccaaataatctgacaccctgtctgcgaacgttaatgcggtcggtcttccggagtaatcaaacaatagctttttatattcggcatgaaaaacgggatcattctttaattctttgaaagccgtttcgatttcctcaaggggccgcatcaatgtttcagggacaaatttgccgccgaattcgccgtatcttccgatttcatttggatatggatacatagtggttcatcctttcttctaaaagccggatcagtgtttgatccttttgtccgtttttttcaattccgctggcaagatctataccgcacggacgcgatctcagtaagccggtaatcgtttcaggattaacgccgcccgcaataaaacagcgcttgcttgcattttgagcctgatttcggtacaaggggacacgagcccatgaaaacgcgattcccgtgccgcctctcattccttttactgaagaatcaatgacatagccgtcgacagcaggtgcaaattgagccatctgacgaagcgtcccttccccgtgatggagcgctttccatatttccgagcgcacaagcggacggaggcggcgggcatcctcaggcgattcatcaccgtgaagctggatggcgtcaagtgccagatcagaggcgatttgcgcgatgttttctatcgtttcatttacaaatactccgacatgtttcttgtctgtccagacctgctctttccatttccggacctcatccggcgttactctccgtttgcttgcggcaaaaacaaatcccagataatccgctcctgaagctgccgcaagttcgtaatcacgcttcgatcgtatcccgcagtactttacctcaggctttttcatatcatcactccccgaacagtccgcggatcgccttttgctgcgaatcctctctcattaaggattctccgaccaatacagcctgcgccccgtgcttgttgacgaattgcaggtcagccaaagaaccgatgccgctttcgctgaccagcaggcagccgtccggtacaagctgcgctattttttccgtttgcgaaacagaagtacggaacgtttttaagtcccggttgtttatgccgagaatgtccggctgaaacacttgtaaaatccgttcaagcacagtttcatcatggacttcaacgagaacgtccatgcccttctcgcgggcttccagataaagctcatgaagctctgaaggttccagcgcttccccgatcagcaaaatggcatcggcgccgatcctgaacgattcctccacctgaagggaatcaataataaaatcttttctcagcacgggaagagacacggtttgtttaacatctgtcagaaattgatttctcccctgaaaaaaacgggtatccgtgagaactgaaagggcgtcggctttagccgcttcataatccgccgcaatcgtttccggaacaaaatgctctttaatcaatcctttagacggcgaagcttttttcacttcggcaatcagcccgataaaacggttcgggttctggagcgcttttttaaaggatctccgttcaatttgacaggtttccggcagcacgatggatttgatttcttcttttttctgctgaatgatttgatcaagcatacatttcttcctctttctgtttcagacgttcgagctgccttttggcatctccgttttgaatcgcttctaaggcggttttcgttccttctttcagatcgtttgcaagacctgccgtataaatggccgcgcccgcatttaaggcggtaatatgcagagcggatgacggagctttatttgcaaaaatattctgaatgaggagcgcgctttcttccgatgaactcacttgaatatcctttagtgaaccttctgcaaaaccgaattgttcaggtgaaacggaatattccagacgttcaccgtttttcagttcaatgatatcggtcggtgctgagatggacaattcatctaatccgtcacgggccgacacaagcatgacgtgtctgacatcaaattgttccagagcgctagccatcaggcgcgctttatcaaatgaatagacgccgatcacctgccgcttcacctgcagcgggttgctgagcgggcccagcagattaaatacggttcggaagccaagctcttttcttgcggcggcgacgtgcttcattgacgaatgaaacagcggcgcaaacaaaaaccccatttgtttcatttcaatgctgcgtttgacgctgtctggagtggcttgaatggaaacccccagcttttccagcacatccgcgctgccgcttttagacgaaacggagcgatttccgtgcttggcaactttagctccggcagcagaagctgtaattgccgctgccgtggatatgttaaacgtagaaatcccgtctccgcctgttccgcacgtatcaacgacatccgtcaagctacctgatgtctgtgcccgcgcccgcatcacttttacaaatccggcaagctcctccgccgtttcacctcggtgggctaacaccgataaaatcccgccgatctcagactgcgacatgtccccgttcatcatcatttccatcagcttttcggcttctccggttttcagcgtacggccattaacgcacgattgcagaaatttgttcatccgtcttctcctccccgccagaaaagatgtcttctgcgatttgaatcgtttttaaaagcgcccccgctttgttacagctttcttcatattcggcttccgggacggaatcggcgactattcccgcgcccgcctgcaccgatgccgtaccgtttttgacactcatggtgcggatggtaatacacgaatcaattgacccgtcaaatccgatataagcgatacatccgccgtaggtttctctggaagtcggttctaattcatttaaaagctgcatcgcgcggattttcggagcgcccgtgagtgttcctgccgggaatgccgacatcagcgcgtcaacgggatggatgccctgctttaaacggccggttacaacagagatgatgtgcatcacatgtgaaaaagaaacgacctttgtgaattccggaacggctacggaaccgtactccgcaactctgccgatgtcattgcgcgcaagatcgacgagcatgtaatgttcagctttttctttttcgtcattcatcagctcttttttcaggcgttcgtcctcttcttttccggcgccccttcttctcgttccggcaatcggatgaatttccaggtgcctgtcatgcacgcggatcagacgttcaggcgaactcccgacaatgtctctgtcaggcagtttgatatagtacatatagggtgaaggattgatgatgcgaagcaccctgtacagctcaaatgaatgcctggataccggaatgtcaaacttttgcgaaagcaccccttgaaaaatgtctcccgcttttatatattctttcagtttattaacgccggccataaactcttctttcgtataattggatgtcacagcggcaaaacttggcgtgtcaaacgtttctttagaaaaaaacggctctttcatatctttcgattctgtcaaaataccgataagcttacgaagctccgcgcaattttctttaaaaacggcccgcttttcttcctccgtctcccggccgttaagctccgcatattgaatgaaatgcacttgtttcgtttcgtggtcgtacgcgatgattttccggcagacaaacagcatgcatttttcgaaatctgttactttcgcgtggcttggcacggaaggctcaatcaaaggaatcatgtcatagctcagataaccgaccgcccctcccgaaaatgggatatcaagctcgggtgttttaatgcggaagctctcattcatccagtcaagcacggcttttaattctccggcttcaaacagcgtatgcccatttggatcagcggcagtgaatgtgttatgactctctttaatcgtgataaaaggatcaaggccgataaaagagtatctcgaccagcttgacgactcatccttgctttctaaaagatacgtaatgtttctgtccagtttttcaaccatctgaatgggtgtgatcgtgtcgaccgtaaaagtctctgcgattggaatggtgcggtgtgtcagactgtcctttaaaaataaagaaacatccgattgtaaattcatgattctcctccttacggtaaggagaatgagatgaagagtgagaggagtcttgcgtataagaaataaacccaaaagaaaggcttcttttgggcagaataaaaacgtgtttatctcagctcagctaaactcattctctgctaccctattctaaactcaactgttcaatgtcttacttaccagctctatacacactcttgtgtatttctaagctttgtttatcgtattacatgtcagtattttttgtcaatgataaatccggccttaacacaacggctttttctaaatagacatgcttgatttcatcctgaggcgtatccgtctgaaccgtcatcaggacacggatacacttttgcagagcgccggtgacatccatttcctgcatgcacgtcaccgggacgtattgccacccggaaaggcggcggaccgcttttgccggaaatacggaatggatatcaggcgtggcggataacaggatctgtacaacgtcttccggcttgcatccattttgttcaatgattttttcaagcagctgctgtgttttttctaaaatttcttgtccggtgtcttgttccaccgttgttgctccgcgaatgccgcgtatcatcatgctgtttcctccattcgccatttgttcagcaaattttcgagctcatcttttgaaagcatgcagtcccgcgcttcgcctaattcctttaacacgataaactgtgtcatgcctccgcgcgtttttttatcattcatcatccgggcggagagaaccggcgtttcaatatcttgtctgatgcttcccggatagccgagcccaatcagccattgtgtaagttctttcctgttcatcttgcaacgtgcaacctgttcactcacgtaaagggcaaactgcatgccgagggcgaccgcatctccatgtgtaatccgtccgtagccgtattccgcctcaacggcatggccaagcgtatggccgaaattcagaaaagctcttaccccctcttccttttcgtcctcacgcacgacggccgatttgattgaaattcctttataaatcatttcattcagctcagcgcttgtcagtccttgcaacgtgtcaaacgtgagaagtttttctaaaaaagcatgatcggcgataaacgcgtgtttgatcacttcagccatgcccgatctcagctcttgttccggcagggttttcagtagctccgtatcgtaaatcaccgctttcggctgataaaacgcgccgattaagttctttccgagtttatgattgacggccaccttgccgccgaccgcgctgtcatgggcaagcagtgttgtcggcatttgaatgaaatcaattccgcgcataaaagttgctgcgcaaaagccggccaaatcacccgtcacgccgcctccgaaggcaatcatacatgaggagcggtccatatggaaagcgatcgcttccgtttgaatccgttcatactcttttagagatttcgcttcttctccgcttggaacgatcacttttttcacgggccatgtttcgtttaaaagccggaacatctcatcaccgtaaagccggtcaacttcagcatcgatgatgagaaggatctttgtcagcggcctgttcagtgaagacaaaagggcagcggcctgtttccttataccttcaccgatatacacgggatatgcggaggaagctgtccgaacctcaagctctttcatcagaattccctcgataattttttcatgttttcaacattttctttaattcggtcgatctggtcaagcccgaattgttctacgacggcatttgcgatttcccaggccactgctgcttcagccactacacttgctgccggaaccgcgcagctgtctgaacgttcaatgctcgctgtaaacggttctttcgtttcaatgtcgacgcttttcagcggcttgtacaaagtagggatcggtttcataacgccgcggacgacaatcggcattcccgtcgtcataccgccttctaatcctccgagcctgtttgtggcgcgtgtatagcctttctcttcatcccatacgatttcatcatgaacttcactgccgtttttgccggccgcttcaaaaccgatgccgaactctacgcctttaaacgcgttaatcgacagaacggcagcagcgagcttgctgtccagcttacggtcatagtggacatagcttccgacaccgaccggcatgccttcgacgatcacttcaacgattccgccgatcgagtcgccgtttgccttcgcttcatcaatggctgccatcatttgacggcctgcttcttcatcgtagcatctgaccggtgattcttccgttacccgttggagatcctcaatggatgtgtaatcggttttctctgcttttacgctgccgatttgcaggacatgtccggcgactttaatgccaagctcagctaaaatctttttagcgacggctccggcagccacgcgaaccgttgtctcacgcgcggaagatcgttctaacacatttctcatatcacggtgattatacttaatagcaccgttcaaatctgcgtgtcccggtctcggtcttgaaatctggcgtttcatttcactttcttcttcttctgtaatcggtgcggcgcccatgatttttgtccagtgagtccagtctttattttctacaacgagcgcgatcggtgaaccgagtgtccgggcatgccgcacgccgcttgtgatcttcgctctgtccgtttcaatctgcatgcggcgtccgcggccgtgccctttttgacgtctggcaagctcaaaattaatgtcttcttcagttatataaagccccgcaggcacaccttctataattgtcgtcagctgcggaccgtgtgattctccggctgttaagtatctcatttctttcttctcccttcatcgcattaacgcttttaagtaaaactataccacaagttttcattaaatgtcttctatcttttttgataaaaaaatgtatcagtgctctcaaggccgaatttttccgggctgaaaatctgttctgtactgccgacaaacagaattccgttctttttcagactgcccgccattttcacatacagctcttcttttgctttttcagtaaaataaataaagacgttgcggcagacgatcagatcaaaatcctgttcatagctgtcggcaagcaggttgtgccgcttaaaccggatgcttttttgaatctcttgttttacttgataactgttgtcagcctgcttagtgaaataacggcttttcactgaagccggcacctcttgcagcgagcgttcctgatagatgccccgcttagctttgctcagcgccttctcatcaatatctgtcgccaatatttcaaatccggccagtcccgtctgctgattgagaatcatcgccaaagtataaggttcctctcccgttgaacaggccgcgctccatatttttaacggtttgttatgctttattaacggaagaattgaagtttcaagaacttcccaccgtttataatttcggtaaaattcagaaacattgatcgtcattctgtccaatgtttcatttaataaaagcttgtccttttccaaagcggcggcaaattcctgaaaatctctgaaccccttcttttcataaagggacgtcagccgccttttcatctgtgcttctttgtataaagataaatcaacgccggttatttgtttccacttggtgataaaaatgtcgtaaggctccattgcttctctcccaatctcgctgtcttttgtcctagtatagcctgttttctgtcgaaattgtacgatttcaataaaaaaatcagcccgcgggctgatttgtgagaaacgaaaagacagggcagcgcagcctctgtctttcataaatgatgtaaaccttttcataatacgagaaaaagaaaggctgacggcttagtacacccagtcggccattaatttttgatacggtacaagctcttcctgtttaaagaaaatgtgaatttcccgctcagcgctttctaaggagtctgaaccgtgaatgatatttttgccgacaaacatgccgtagtcaccgcggattgtgcccggcagtgcatctttcgggttcgtttttccgatcagctgtcttgtgatctctactacattttccccttcccataccattgcaaatacgggtcctgatgtaatgaattccacaagctcgccgaaaaacggcttccctttatgttcagcataatgggtttcagccatctgttctgaaacttgcattagcttggctcctgccaattgtaagcccttacgctcaaatctggataaaatctctccgatcagctggcgctgtacgccgtccggttttaccatgataaaagttttttccataagattctccaccccatcattatgtataggctttcaagttgcacaccgaaatcgtaacatctttctgacaattaatcaatccagggcggagaatgttcacatcttgttcgtaaaaggaatttaaaatttccgtttgccgatatatttggcgatggcggccaatgatgagcgcgcacgtcctctcggcagtgtattcagtttttcaaacgctttttttaagtacctgtcactgacggctattgatttttcaatcgcgtctgtgcgtttaatattttcaataatgggggcgagctgctcctgtgttgtttcactgttaattaatttcagctgatttttcaattcaggctgactgagcgcgtacaaaacgggcagagtgacatttccttgcagcagatcccctccgaccggttttcccagttcctcttccgttgaagtgaaatcaagaatgtcgtcaataatctgataggacatgcccacgtaataaccgaaccaatataatgctttgtgaatcttctcatcagctcccgaagcgatggcgccgagctggcagctgacggcaatgagaagagccgttttccgtttgatgcggcgcaaataggttctgaggttttgttccatattgtatttatctctgatctgttcaatttctccgaggcatacttctacgatggttttggacaggatccggtgggctttcggctcatccaatctcgtcatcatctcaagtgagcccgcaagcatataatcaccggtatacatggcgatgcggttgtcccacttggctttgatggtcggttttcccctccgcagctcggcgtcatcaatgacgtcgtcatgcacgagggacgccatatgaatcatttccagcgtcaccgcaacatattttattttattaatgtcatagtcgccgaacatgccggaaagcaatacgaaaacagggcggatccgcttgccgcccgcctggagcaggtggagcccggcttcactcagcaagggatagtctgaccgcaccgtttgctcaagctccctttcgatcacatcaatatcgtcatttaaaaaagaataggccattttaaatttcatatcattcacccaaacatctgtatattcatcatttccaaccgatatgcgtagcagccactccgccggtaaacgaatggtatttgacattcgtcaggcccgcttcttcaaacagacgggcaagttctttcataccgggaaattctcttgccgattcttgaagccaagaatattctttatagctcttcgcaaacatttttccgaagaaaggcatgatgtatttaaaataaagaaaatatgcctgtctgaatccgaacatttccggctgggatgtttccagacatacgacctgcccgcccggtttgacgacccgccgcatttctttcagcacggtcagatagtcgggaacgttccgcagcccgaagccgatggtgacaaaatcaaaagaatcatcagcgaaaggaagctccatcgcatttccgtgcaaaagctcaatttggctgtaaccgccctctttcacttttttctcaccgatgctcagcatatttttgctgaaatccagtcctttgatttcgccgctttttccggccgcttctgcgagggcaatcgtccagtcagcagttccgcagcagacatcaagcgcttttgcgccttcttttacattcatgatctgcatcgttttatcgcgccattttttatgctgctgaaaactgataacagagttcatttggtcataatttttatagattttttcaaacacgccgtgtacgcgctgttcttttgactcctgcatgttgattacccttcttccactttctgatgatatgttttgtcctggctgatcgctttaagccggttcagcattaggttttgaattggtgaattgagcggcagcagcgtttcaatgctttgctttgcctttcggaagctatcttccattatgtcagcctttgatttccctgactttacaatattgccgatgacatcgagaaatatagcattgccgttcatcagccgcttatatacaaaaaaatcactcgccagctctttccagcgcggaagattaaagtggtctgacactctgtgaaacagggccgcttccacaatcgccatgctttcgatcaattgattcaagtcattgacagaccgatcgtacagacggattttatgctcattgatttctttaattgccgtagcgagcgtccgaatcatatagatatccttcatttcagataaaagcgaataatacagtccgctgaaatagtcgccggcaagcacggtgagctgccggtttttattttcgtctcgctttaacgctctggctgttgtcacttcatcgtgggtatcaagggcgctttggacaagcatcgcagttactatgtaattttctctgtcgttgttcttaatgtccgcctcttcaaacaaagcgtgaaaaagaagaagcttatcctcatcgattttaggcgcagaaatatgtttcgctaaataaggatgagacagcttttgttttaatttcatatttagattcgctaaagttccgtagatgtcttgcaaaaatatcacccttgtccccaaattcacatttattctaatatgtatgagatttactcgtcattattatacgcaggtatcattatagcataaaaaaaagaaattggctgtattctcccgccgtttgcgggcatttggcaaaagcgggaaacagccggcttattttttttcgctgttcatttctccgtaagcggtctggatgagggcgttgcctctcactttgatggcagaggtatgctcagtaaactgagcgataatcacttcgcctttgtccagtttttcggaatggtgaaatttcgtatccgttcctctcgttaaaccgatgacgttcacgccgtcctcgaccgctttaatgacgacaaaatcacttgaatgctttgaattcatatctgcaccctctatcattattaatccgcacgtttaatatgttctaacacttcggaacgcgccgctgcgtcatctttaaaaatacctcttacagcggaagtcactgtttttgcacccggctttcttacgcccctcatcgtcatgcacatatgctcagcttcgacgacaaccatgacgccgtggggatctaaggtctccacgatgctttctgcaatcgttgaagtgatgcgctcctgcagctgcgggcgttttgagacggcttccaccgcccgcgccaatttactcaggcccgtcactttgccgccgcgcggaatgtaggcaatatgcgcttttccgtaaaaaggaacaaggtgatgttcacacatggaatgaaacgcgatatcttttacaagaacaagctcctcatggtcttctccgaaaacggttttaaagtgttctttcgggtcttcatttaatcccgagaatacttccgcgtacatttttgccacgcgtttcggcgtatctaaaagcccttcccggtccgggtcttctccaatcgcctctaaaatctggcgaaccgcctgttcaatctgttctttattaacttctttcattgtctgtgtcctccaccattgaatacatttaatttcgattctagcacatttgccgcgccaaaagcaaaacgaaagtcctgcccggtgaccgaggctgcttaaatatgaaaagcccctttatcaaggggcttttctgtgaagaaacaaagtgtatgtatcagatgcatacacgatctatattcacaattattttcctgcaacagcgtctttaagagctttacctggtttgaaagcaggtaccttgcttgcagggatttcgatttcttcacctgtttgcgggttacgtcctttacgtgcagagcgctcgcgcacctcaaagttaccgaaaccgatcagttggattttatcaccgtttttaagtgcatctaaaatcgtatcaaaaacagaatcaactgcttttgtagcgtcttttttagacaattcgcttgcttcagcaaccgcattgattagttctgtcttgttcatgcctttcacctcctcccaaaagggtatcaaatcagcagtttattatcatttcttcacagttcagcctgattctaaacctgtctgataaaaaatcaaagcagggaagaacagacaagtaaacggcttttcaaaagaaaacagacactttgaggaatgtttgtccaacaaagtgaagattttctgtatgtagagtaacacatataaaaagccatatcaagcattttaaagcctcaatcccttgctcgtcaaggttttcacgtgttttaccgaacaaatattcctttttttgcttttttcctcctaatccttgattgatttccagtatctaaaaagaataaaaaaagaccccccgtttcaggaagaggtccttcagcttacaaaataatggcgatcaggccgcctgagccttcgttaataattctctccagcgtttctttcagtttatatctcgcattttccggcatgagtgacagttttgcggagattccttctcttacgatagagctcaatgatctgccgaaaatatcggagttccagatagaaagcggatcatcttcaaagtcctgcattaagtaacggacaagttcttcactttgtttttccgtcccgatgatcggcgcgaattcactttccacatccactttgatcatatgaatggacggagcgaccgctttgagccttactccaaaccttgatccctgtctgatgatttccggttcatcaaggctcatatcggctaaggccggggcggcaatgccgtagccggtctgtttcaccattttcagcgcatctgatacctgatcatattcttttttcgcgtgggcgaagtcctgcattaattcaagcaggtggtctttcccgcggatttcaacaccgacaacttcttttaaaatctggtcatataaatgatccggcgcatacaaatcaatttctgcgacaccctggccaagttcgattccggccagaccggcgctttcaataaactcaaattcactgaagtggccgacaacccggtcgacatcgcgcaggcgtttaatatcttttacggtttctttcactgattcctggtagctctctctgagccagtgattttctttcagcaccatgacccagctcggaaggttgacattgacttccagcacagggaactcgtaaagcgcttctctgaggacgcttaacacatctgtttcccgcatgctttcaacactcatggcgaggacgggaatatcatatttcgcgcttaattcagctctgagcgcttctgtttccgggtggtacggttttaccgagttgatgaccataataaacggtttgccgacttccttcagctcgtcgatgactctttcttccgcttccacgtaatcgccccgcgcaatatcgccgattgagccgtctgtcgtaatgacgacccctattgtggagtgttcctggatgacttttctcgtaccgatttccgctgcctcatgaaagggaatcggttcttcgtaccaaggtgtattgatcattctcgggccgttttcatcctcatatcccttcgccccgggaaccgtatatcccacacaatccacaagacggatgttgacatccagtccttccgcaacatgaacggacatggcttgattcgggacaaattttggttctgtggtcattatcgtttttcctgctgcgctttgcggaagctcatcctgcgcccgcgctcgatcggcctcattgctgatattcgggagcaccacgagctccataaattttttaatgaatgtagatttccctgtacggacagcgccaacgactcctaagtatatatcgccccctgttcgttcagcgatatccttgaaaatatcgaccttttccaagtgatcccctcccggacttcctatccttatcatttttcattcaccattctccaatcaaatacaggacactatatgtgtatgacgttgtcctatttcaatatgacatctttagaaaattttcaggcagtcttttctatcaaaatcaaaaaaacctttctccctatttgtatgcgcgggaaaaaggttcattcctgtttcgtttgactttctaaaaaaacgggttcctgtttttcatttacggtgtatgtgactgaaaaggccgggacgaaaggagtctctttccataaaatatcttgaatttccgcgcccggtttgattttctttttgttttccttcaggcagcgggcgagatcgacgcgatagtcggcatagatttctccgtcagcgccgattaaaagcggcagagacgtgcctgaaaccggacttttgactgaaggagagtctttcatgccgagcttttttttatttaaagtgaaaagcccttttgaaacggcgtcctcatagggaggatatgtatgcttttcctgatacattttgacacgcagcttcatgtcgcggattgcttccgccatttggagatcgaccagcttgacggtcggcttatgttccacatcgacaagcacgtattggtacattcccccgctttcataagctgaggccggcggctcctctatgtatctgggcgcgagccgcttaaaatctatcggatatttttgatagagcggtgttttcatatcttttgtctgaatcggcagaagtccgccgttcgcctttttaaattcatccactgccgcttgcacctgctgaagctgatgtttgtaagatactttattttcagttttttccgcttcagggtacagacagccggacagcaggagcaccgccattgccgttatgacggccatttttaacttatgcattccgcgccccctttttgctttattcattgacaggcccgctgaaaacgaccattaacacgatcaatcccgagatgaccatgcaggcataagcaagtgaagaaaccgctgcttttatcagtttgtttttcactttgtacctgctgacataaatagaggccaccgcaacaaacattaatcccatagcaccaagcgcaaaccacattttcatcaatgccacactcacgttcgtgccccccgtcccatcattgtaagcgttatatttcattttaatatacaaatgttgaaaagatcaacaggttttccatctattgaaaaaacaaaaaaactgaagcaaagagggggactttgcttcagtcaagttgactatattcacctgtacgtctgagatacactctcttggacttcgatgctatagtatgcgcagatgcatacgtctgcatcctcttctgcctaaatcagcaaatgttttaagcgatttcagccggagagttctgcgttttggactttcgtcacttcagaatatgctgacggcatgttattgtcacttcacccggttttcgaatgtgttgaccaagtcttccatctcatgggttttcactctggccattaaggattctacggccgtttctaccttctgcccgttaaataatacttggtgaagcgcctctgtgatcggcattttcacttggtatttttgagacagctgatacgcagctttcgtcgtccgcacgccttcaacaaccatccccatcttatccaggacagcttccagcttatatcctttgccgagcaggttgccggcgcgccagtttcgggaatgaacgcttgtacacgtcacgattaaatcgcctacgccggtcaggccggaaaaggtgagcggatttccgcccatctttgtgccgagtctggcgatttcagcaagacctcgggtgattaaggccgcttttgcattatctccgtatcccaatccgtctgtaatccccgctgcaagagcgatgatattctttaacgctccccctatttcaacaccgatcatatccggattggtatagacgcggaaatgctggttcatgaataaatcctgaaccgcttctgcagccttgatattttttgaagatgatgtaacagtcgtcgggtgtcttaatccgacttcctcagcgtggctcggccctgaaagcacgacgatgtcttttctgtactcctcaggcagctcctcttccattaattctgaaatgcggagaagcgaatccggctcaattcccttgctgacatgaacaaaaatcgattgtttcgggatgtacggcagagcctttttcagcacttcccgaatggcttttgtcggaactgccacaatgatgaagtcagctccttttaaagcctcgcttaaatcagctgtaccgatgatagaacttgatagctccacccccggcaggtaatctttgttttcatgcagttcgttgatttgatcgatcaattcggcacggtgtccccacatcatgacttgatgtccgttatcagccagcactaaagaaagtgcagtgccccagcttcccgctccaagcattgccacttttttcatctctgtatcacacctttttattttcttgctcttgcaaatattttaattggcgtaccttcaaatccgaaagcgtcccggattcggttttctaaaaagcgttcataagaaaaatgcatcagttccggatcgttgacaaaaacaacgaagctcggcggcttaacagcgacttgagtcgcatagtaaattttcagacgggagccgttgtgcgtcggagtcggattcatggcgaccgcatccataatgacatcatttaagacatttgtctgcacgcggagagagtggttttcactcgctttaataatcgcaggcatgagtgtatgaatccgctttgtcgtcagtgccgacataaacagcaccggcgcgtaatcgagaaattggaaatgttcccgaatattctgttcaaattctttcatcgtgcgctcgtctttatcaacggcatcccatttgtttacgataatgacgacggctttcccggcttcatgggcgtatccggcgatccgcttgtcctgctcaaggatgccttcttctgcattcagcacaacgccgacgacgtctgagcggtcaatggcttttaacgcccgaagcacactgtatttttctgttgtttcatatactttacccttttttctcattcccgccgtgtcaacgattacaaattcctgctgattgtaggtgaacgccgtatccacagcgtctctagtcgttccggctacgttgctcacgataacccgctcttcgccgagcatcgcattgacaagggatgattttccgacattcgggcggccgatcaggcagaattgaacgacatcatcactgtacttcgtctccggaatgtttttaaaatgctcggcacaagcatcgagcaaatctcccaatcctaaaccgtgtgtgcccgaaatcggatacggttctccaaagccgagcgcataaaagtcatagatgttcgctctcatttcggtattatctaatttattaacggctaatacgaccggttttttcgtccggtacagtatttttgccacttcttcatccgcagacgtcacaccttcgcggccgttcaccataaagatgatcacatcagcctcgtccatggcgatttcagcctgctggcggatctgtgtcagaaacggttcgtctccgatatcaattccgcccgtatcaatcaggttaaaatcataattcagccattccgccgaactgtatatccggtcccgcgtcactccgggggtatcttctactattgaaattctttcacccgcaatccggttaaagattgtggattttcccacattcggtcttccgacaatggctacgacaggtttacccatagtacccttcctttcaatccagccgcttacattttcacaaaaaattgttcaaccggttattaaaaatcatcttcgctatgaaaagaacccttcaaacagaagggcttaactcatttattatatcagttttcactgagatcacaatgtattcttcaaaatgtttcgcattcatgtaacagtctccgtctgttttcaagacatttttgtcgctcctttgccctgctttttgcttttttggctgatgcgcgccgcaagctgttcatatgtagtcagcccgacgagaagaaccactcccgccgaacagcctgaaagccacttataatccccgacggctgccgcacccgcaatattgcggatgaccgcagcatacaatagctccccctggcacatgccgagaacaaaaagacaaagcctctcagggaaccgcccctcaacggaaagcgtaataacggtaagcagtataaccgccgcccattcaggttttatgataaaccaaacaggatcatataatgcaaaaagaaaaataaagccgtacgccgcagccgccgtcagatgaatcacaatattacggagccgtttatgcatgccgaggcttcccgcataaacaaatgccgcagcaaaaaacatgacatatgccgcattcagcgtaaaataagccgtaatctgatgtatgcttgccatcatattagtcaaaataaagactgatacgtaaaaacggcttttcgttttggcaaaaataaaagtcgcaagtatccataaaaaccacattgaccagtaataataaaacggttccataatcgctcctcctctgatcagtatggagcgggaacgcattttttaaaccaattatgcctgaaaggagcggataaggatgggaaaagacagacaggagaaaaaactgaaagcctcccgacgagtggaatctgatcgcgatgattcgattcaccataaaggagcgacaagccttgagcaaaacggggaattccgaaaaagaaaatcgtaaaaaacagaaaaaggcatgcgggttcgcatgccttttaacgtctgctgaaacaggacgtgtcaatcccccgttcagaaagccagtgatgtgtgtcaccttttatgaccaaaggcgccttttgcaattgggaaaccgattggcatccgagggcggtcataatcattttcagctcttgcaaaagcgccgtcatctcgtcaaacaggccctcttctcctttagaggtgagagctttcaggaaagtgcccgccattcccgcgccggaagcgccgagggcaatcgatttggcgacatccagggcgctttgcagcccgccggatgcgataattgattgatcagcggagagcgagtggatttccgctaagcttgcggcagtggaaattccccacgtattaaaaaaatgaagcgccttctctctgcgcatattttcgatcttagagaaatttgtaccgccgtatccgccggcatcaactgctgctgcgccagcatcaaataactgccgtgccgattccctgctcattccgaagccgacttctttgacaaaaacgggaactcccgcttccgccgcaatccgctcaatacggcagagagcgccagtaaagcttctgtcaccctctggcatgacgatctcctgaatcacatttaaatgaatctggagggcatctgcttgaatcatatcaactgctcttttcgcctgctcggcatccgcctcgctgcctaaattggcaaatatcagcccgtccggattctcttttctgacgatctcataagaacaccgttcggagggatcttttaaagctgacatttgcgaaccgacagccagcggcatgccggctttgcgcgccgctcttgccagcgatctgttaatttcgtatgtaagctgtccgccgccgcctgtcatcgcattgataaaaatcggcgaactgcttgtgagtccgccgattttcgttgatatatccactttttccaatgctaggttcggtaggctgacatgaacaaacataatatcatcaagccccgtttcccggttttggccggtagacagcgcatgatttatatgttctctttttcgttctgctcgtgtcacgttttatcaccaatttattttaatttattaagcttgtctccgattaaatcgccaagctggaagccggtgctcggctcttctttcgcctggtattggcggaagtcctcctgatcggctttcggcgcttcttcaagctcacgcatgcttaaggaaatgcgctcttcgctttcgttcacgtcaagcactttcactttaacagtctgtccttcttcaagcacttcatgcggcgttccgatatgtttattggaaatttgcgaaatgtgcacaagtccttccacgcccggaagaatttcaacgaaggcgccgaagcttacaaggcgctgcacttttccttcaagcacatctccctgttttaccttttcgccgacctggctccaaggtcccggcagcgtttctttaatagataaagaaatacgctcgttatcgcggtctacggacagtactttcacttttacgtcctgaccttcttccaccacgtcagacggtttttcgacgtgtgaatgagacagctgcgaaatatgaacaagcccgtcaattccgccgatgtcgacaaatgcgccgaaatcagtcagacgctgcacttttccttcaagcacgcttccaacctcaagcgtttggagaaaatcatgttttttggctgtctgttctttttccactacagcccggtgtgacagaatcacccggtttttatcacggtcgagttcaacgacgataagagagagggttttccctttatagtcagtgaaatcctcgacgaaatgagcttcgacaagtgatgcgggaatgaagccgcgaacgccgatatcaacgacgagaccgcctttcaccacatctttcacttcagcttcaaacacttcttttgtgtcgaattttttttcaaggtcttcccaagcgcggtcagcatcaacggcacgtttagataaaatcaaagcatcgtcttccacttttgttactttcaggtcaagctcgtcgtcaacttttacgacatccgatgctttctctacatgaagacttgataattcactgattggaatgattccggactgtttgacattgacaatttcgacatctacatgcttgtcctctacctttgtcacaatcccttttactacatctccaacctctggcacttgaacatcaatttgattcatttcctctgtcatttgaataacctccttggtccaaacctacacagcttaattaatacggtttgaaagctgaacatgtgaatgtccgcttttcagccgaatatgtattaaagaatcatccaaaaaagattttgaatgatcaataaaaagttttattagtattaacttctaataaatggactggtttgtcaagcaataacatcttgtctttcgaaaaaaattataaagcgctccgcccgaagttaacgtgatttctgttcgacgatctccagaatttttcctgcgacttcggcaatgctgagtgacgtcgtatcgatttcaatcgcgtcttccgctttgcgcagcggggaaacttccctctctgaatcgagtttgtcgcgtctggaaatttcttcaatgagcgtctcgtaattcacgtcatagccttttttcttattctcttcatatcggcgcttcgctctttcctctacggacgcgagcagaaaaattttcacttcggcatcaggcagcacatgagtaccgatatcacggccgtccatgacgacaccgcctttttgtccgagctgctgctgtcttttgaccatttcttctctgacgcctttatgcttggcggcgattgatacttggttgctgacttcgtctttacggatttcttctgtcacatcttctccgtttaccagaacgatttgtccttccggagcggatacaagctcaatttccgtacgcttcagcagctctgtaagcgctgcttcatcagttaaatcggcattctgcttgagcgccgtatatgtaatggcacgatacatcgctcctgtatcaatgtacacatatgattttttctcagccactattttagcaacggtgctttttccggcagcggccggcccgtcgatcgcaattgataatttcttgtccataatctctctccttgctctttactcctctatggattgtatcatgaactgccggaaaaggggcgaaaaaattgagctgatttaccgctttaccgtttcaatccattcttttttctccattttatcaactccctcatatttcacagctttcgaaatataaggttcaataggctgataatgaagcaaaaattgcaccgcgcccaaaatgataagctgaatgcagaccaatttgaccagcagacgttcaaacgttttcatatacgcgcacctccattaggattagtatggaaaagtgcgctgctgtttattccgacagactgtttcttctctgctgaagctgcgcgcgcatacaatattggagtaaaagctgctgtgatgcaggatcgatttctgcaaattcaagcgtcattttttgtttatccgccttttcatcataaaaaatccgctgggtaacagcctcggccgtaatatcggctgtattttccttgccgggaagagaaaatgagacatacagcttttcacctggttccgcggaaatatgctcaggcatcacaacagcgattccgccggcgctgatattagaggaaaccgtttggaaagcggttttttccgcttccattttgacggatacatccaatactgcgtctgcacggacgtatcggcgtctttgaatccgcttcatttcctcctgaggggggatgtccaatccgatcatcgggatggggtcttttttctttcctttgattatgcttttaaattgatacggcacgtggccattccccataaattccgctgttatttccaatcctttatgcaaaaagaccgtccgtcccgaatccagatcgacaggatatgagatgtgcagttcgccgttttcaacgcttactgctttgctcctcgcttttttgggctcattgttctctatgtattcaatccaaatataatctccgacagctatcatgggccttcactctttcattatttatgcttttattaaagcatgtaacgaaaaaaaggaaaagacttttagtcctttcctcctttatttttataggtctttatatataggttctgcactttttaacttttctattttttcctcttttccgtcgtccgcattaatgaacatttgatacgtgtctttcccgatcgtcccaagcatttcgtagcaaagcacttcctgaccgagttcattcgtgatcagcgcctgccgcgtctcccgcacttcaacatttttattcagcttcgctttcgcttcatcagctgacaaagcgggagccggaatcgttctcgtgcggtgcgccgccaggtaatcacgcgcggaaaaaccgacgacttcaccatcatccagcgccactttcattcggatggcttccggataaatgcggacgtttttctccacggggataaaagaaaagacgccgatgttattatattgcgcgctttcatcaatttcgaggccttttgtttcatatccatttttctttaaaaacgcgacggcccggttagatgcttcattgaggctgatcttttgtttcttcacggcccgtttttgaatcaaatagaccggatgtccgcctttttgggtaatatccatatagataaaagacttgttgtccgcgtctttcatgcggatgctgtatacgtcccgattcgtcttcctgccgcttttgaccactttaattgaataattatgatcaggcgcaaaccgttgtgcgattttgaccgcttctttttccgtaatttgttttcctttcagatgcgtaaaaccttttcgttctgtatttgctcccgtaaatgtggggctgatgctgtcttcagaaaaagcgcctacatttttttcgactgttttaaagctgtcgacgatcgtattatcgctttgttttttgtcagaggcgagcgccatctcaacatccatccaccgtaaatttttgctcatgacgagatgctgaacgctgcggagctggttttgaatgttctccgcctgtttgtacaggctgttcagtgttgtatattctttcttatcaagcggtttttgatctaaatcccggacggatgttttatagctgaaatctcctatgttggataaaaactcctccgtcttattaaaaggcatgagagtcagcggcagctggctcacattgttatgtgcttcagatgtaattctccatacatcaatgagcgccggagacagagattttttactgttcattgcaagcgtcgtcccgattttgtcgtgaagctgatcaacatggtacgtcaattcatgaaaagccctctgataattattttccgcatgcagaaggaccgcatctttttcctgatgctctttatatccccagtatccggttgcggcgatcgcgacaccgagaacagcgataatgattcctctaatcatgttaacacctcattttgcgtacttttactcacagaaaatgtgttttccgattctttttatctgcggacgtccccaaatccatttgcttgtcgccgtatcaggattgaaataataaatcgcgttttcagaaggatcccagccgttgatcgcatcaagaaccgcttcttttgctctttcattcggctgcatatatatttggccgtcggcaacggcggtaaacgcgagcggttcgaaaatgacgccggccaccgtattcggaaataacgggcttttaatacggtttaaaataaccgcggcgatggcaacctgcccttcaaacggctcaccgcgtgcttccccgtacacagcctgtgccagaagattgatgtcgttgtttgagaaaccgccaggcatattggccgctgtcgtattttgcttttgatttgactgaccgcctgttttgttttgcggcttttgagcaggcttattcgttcccgccggcttctgcgttccggctctcggttttgtttggttttccaatgggacgttgccataatgagtgaacgtattccctttttggatctgctccattacatattcacggtaatattttgatttagaaatcagcacctgtttggttttcgcgccgacgaggccgtcaaccggcttcatgccgaatttctcctgaaaatttctcacggcccagtatgtggtccagccgtaaacaccatcgattttcccgttataaaatccgttatattgaagacgggcctgcaattctataacatcatcacccgtcgcgcctctttgaatcacttgatttgaaaacgcatgaaccgtttcatgatgatcgaagaaagcggcggcgaaagaaaatagaatgagacatgccataaaggctcctttgcacttcatctcttcaagcctcctactgcaaaatttaaagtgtacccgtattgtctgtcacgaggttatttttatgcacgtttccttcttatcccctgtcaaggcataaaaaagaaaccgcacgcgacgcgcggtttcttcacacttggatcatattgacggagcgtgctttttttgcctttcgcagcccgaaccaccataaaaacagcataaacggcagcatataatatacccaatgattgagggcggtaagaataaaatcgtaagaaccgtgcagacatgaaggcacggccagcgaaatcacaagccatttgacacgggcttttttctgcgaaaagcgggcttttccgagataaaatcccataatcactccgatcagcgcatggcaggagaccggcagaagcgccctgatgaaagcatgctcaacgccgtggccaaatagatacagaatattttcaagcgtggcaaatcctaaagacacactggccccgtaaacgattccgtcataatgctcatcaaaatgagcatgcggatacacactgatcatcagaacgaaccatttcaccgattcttccagaaatcccgaagacaaaaacgaaacgaaaaagcttcctccccccacatgctctttttcaagaacatattggataaacatggtcggaaacacaaggacaaccccgagaaaaaaagacctcagcaccatatgtacgggttcattgtcatactgatcttttaaataaaaatagcttaacagcgcaatgccgggagcaattcctgcagagatgattgcaaacatcaggcaacctctttcctttatattcctatatctatcgtaccatgttgttcacatttttacatctttcaatttttttaaaaaagagcatatgaatgatcatatgctctctgcacccagccgttttgatatttcatttgcgatcaagccgccgtgaaaacggccgttctcgataaaaatttcgttggcgttatttccagccgcaatgactccggcgataaaaacaccgtcaacatttgtttccatcgtttcttcccggaaaaacggccggcctgattccgcatcaatccgcacaccgattttttcgaggaaaccgtgatcgggatggtatcccgtcatggcaaatacgaaatcgtttttcagccggaccgtctcatttcggccggagcggaaaatgatttcatcttccgtcacttcttcaagacaagcgccgaattccatccggattgtgccgtttctgacgagggcctcaaactcaggcagaatccacggcttgatgctcggggagtactcatgtcctctgtagagcaccgtgacgcgcgcaccggacttcaccagttccaaagccgcgtccacacttgagtttttcccgccgatcacagcaacatctttatcaaaataaggatggccttctttaaagtaatgaaataccttaggaagcccttcacccggtatgttcatataattcggatgatcataatatcctgtcgcaatgatacaaaacggagtgaggtagcggtcttttgatgtttctacaagaaaacggccgtcttcctgtttcgttacgcgctccaccgtttcaaaggcgtttacgcgcagctcttttcttctgacaacctctctgtagtaagagagagcctgtatgcggaccggttttctgttttccgtaataaaggcgacatcgccgatctccaatttttcacttgaactgaaaaaagtttggtgggtcggatagttataaatgctgtttacgacattccctttttcgatcacaagcgcgttcacgccaatttgcttcagatgtatagccgccgataatccgcaaggacctccgcctattataattgctttttcttctgtcatgtccttcaactcctgcgattggcatttccatcataagtttccactcatataaaaaatctcctatattatcataggagattttttttgtttatgcaaacgattggtttatatccagcctctgaaacgcgaagcctccgccattttccgcacgccgaccatgtaagccgcaagcctcatgtcaatccggcggttttgggacatttcataaatattattaaacgattttatcatcatattttccagtttttcctcgacttcttcttcactccagtagaagccttggttgttttgaacccattcgaaataagaaaccgttacaccgccggcgctcgccagaacatcgggaaccagcagcgttcctttgtctgtcaggattttcgttccttccagtgtcgtcggtccgtttgccgcttctacaacgattttcgctttgatgcggtcagcgttctcttctgtaatttggttttcgatcgccgccgggacaagtatatcacagtccagctcaagcagctcctgattcgtaatggtgtcattgaaaagcttcgtcaccgttccgaagctgtctctgcggtcaagcaggtaatcaatatcaagaccgtccggatcgtaaaggcctccgtacgcgtcagaaattccgacaactttcgcgccggcgtcatgcataaacttggccagatagctgcccgcgtttccgaaaccttgtacgacgacgcgcgcgttctgaatatcgagaccttttttcttggccgcttcttttatgcagatggtgacgccttttgccgtcgctgattccctgccgtgggatccgccgagtacaagcggttttcccgtaataaagccgggtgagttaaattcatcaattcttgaatattcatccatcatccaagccataatctgtgagtttgtaaatacgtcaggtgccgggacgtctttagtcggtccgacaatctgactgattgctctgacatatcccctgctcagtctttcaagctctctgaatgacatatttctcggatcacaaacaattccgcctttaccaccgccataaggaagatcaataattccgcattttaaactcatccagatggaaagtgctttcacctctttttcagttacattcgggtgaaaacgaatgccgccttttgtcggacctacggaatcattgtgctgcgcacgatagcctgtaaatattttcacagacccgtcatccatccgaacaggaattttaaccgttaataatctgagcggctctttcagcagttcatacacttcttctggataccccaatttttccagagctttatgtattacggtttgggttgattttaatacatcatgtttgtcttcttcattatgaccggtgaatcgatcggctgccatttgagttaacctcctaaaatcttctgtttctctcatgctccctttcagtgactagtatacaccttcaatatctccgtgcatagaagaaagacaatgatttttccattatttcgcttaaaaaaagacggccgctgaaaacagctgccgtttcaaatcttttttatgaaaaatgtttctggatggtctccacagcattgccgtccatgatgagttttccgtactcatggagcctgtaaatcgtaatcgtcgccgggtgtccgtattcagccagcaccgcgatgacgccttcggcggatcgggagccgaggtcttcaaggcttacatagtattggttctcatagtggtagacggtgccgccggtaatcccgattcggtgaaggcttccggcaagctgaatgatatcttcaaacgaatggaactgataaataatatccgggctttcgtcaagtttgacctgcatctcgatataatcatcgtcatattcgtcatcttctgcgtccgcgtcatgatttttcgttacaatcacaaccatgccttgtgcctgaagagaatatacttccaccgcgatcggaccattcgcttcaaagccgagctctgtatttgcttcattcatcatatctttaaataactggtggactttaaacgagtccttccagaggtcttcttttgtcagtccccgatcagtcagatcgtcgagggttaaaaagattttaatcttattatagttcagacgctcaagccgcataatgttccctcctgcctcttcttgcacacaaatcatataacacagtatatgaataaatgagtcataggttcttaatttgttatcagtttacaccgtgtacagcgggaagacaagcagaatgccgttttttatcaccgcggccgggtttgtttcaggaagacggctcatccggtccgcacagcgtaatcatatgcgtctccggtttcgccccgagcctcagcggaacttttgtcgtcccgtagccgttgctgatcaggtaatgcgctttttttaccgttcccgtcccgcccaattcgtacggcccgaaccggccgaaacggatttggccgccatgcgtatggccgctgaacacagcgtcaatcccgtctgactccctcatctgctcatggatgtccgggttatggcaaagcaggaggtttactttgtcagcatccgtatatctgattgcagcatcgtaatcatccatcatcatcctgatatcatccacgccgcagatcgtaacggtttcccctttataagcaaactgaaccgattcatttctcagtgggatcactttgtatgcccgtaaaagagagagcagtttttgctggctgacctcgtaatcgttatttccccacacatacatgacaggcgcgagagccgtcagacgtttgatgttttcttcaattctggcgtaaggaactccgccctccgccatatcaccgccgagcaaaacggcatccggcttataacctgccgcttcgcggagaagcttttcatcaattaaacggcggtgcacgtcagatataaaaaagatggtgagcggcttcatccccttcattttatcaagcgtaaatgtatgtgttttcagatggctgccgtttgccgttttgtacataacggccgccataaccgcagccgctcccgccaatgagccgagaattcccgctgtaagcttcataaacgcactctccattctgtcattgtcttatattagacggacaaacaaaaaaagacgtttctatcctttccggaaaacgcctcattttatttgctttcaaaataaagattgatatcataccgatgtttcatcaagtgaaaaacagattctctcgccctccatttttcaggctggggccataaatccgtgcttttttggataatttcacatctcagtttatgaaattcaccctcagctttttcttccttttttttgaaataataagaagtgcaatacgcaaaagcggaagccataatccagcacaagtaaaccgtatggcctaatatttcctgcagaatcagctgcggagaggcttggggggcattaaagcttttaaacatcagcagtatgcacatcagggaaaaacaaacgagggacgcccactgccatcttcggcattgtgcggcataattttcgtattttaatttccgtttcaccagcgcctgaagcatttgtttcgtcggtccgtcagcaaatcggtctaattgcttccataaagaatccatgcgcttcacaccttgtccgttttcattggtacactatatgaaaaacgaggtgaaaacatgcatttattttaatcagacagcggaatgttcagaacctggccggtgtacacgtcgtttccgtttaatccgttgtagctgcggattttttcttcacccgcccggcttttatagtatttcattgaaatgcggtaaagcgtttctttcggctgtacagtatgctgtacggtccgcactttttttgggacagtcccggcttgatcactcgcctcagccggagccgctttttcacggacagccggcggagactgctgttttgtctccgcgtattcggtgtctgtcggctttacttgtttttctgagggcgtttccgtttttttaggtgttttttcacttggtttttctttcgttttttcaggtgcagccgcttctttcttatctttgtcgtcagacttttttttcggttgttctaaaagagcggtttctgacgtttctttctgagcgcctttcggaataacggcaggcgcgctttcactgtggtctataaagacatcttcatagtccttcgggtcaaatctgctgctgttcgtcatataaagaagaccgaaaaagacaccgattgttacgataatgaacaggacggtcagaaaagtgaacagcggcgtttttgttttggttttttccttcacctgctcttccttttttttacgctcctcttttacagattgtcttgtcgggaggctgtcttcaagatattcaatttgttcatccgcggccgcggcaacctgctgctcggcacgcagctgagcttttcttctttcaactcttgacatttccgtcatgcaaacccctcctaacatattgaaaacggatctgacaggcaaataccgcatcaataataaaatgcgctgtaaccggaacgaataaattgccggtccattcatagataagccccagcaaaagactgatgcccgcaaccatcataaacagaagccacttcgccaagtatctgaaatgaagcacggtaaaaatgaagctggcggcccataagccgatatgtgtctgcagaacgcctctgaacaaaatctcttcgctgaacgaaatgagaagcgtcaaaaacaaaatgtgcagaaccggcctgttcttaaaaagcaatacattaatgccgccgtcatcatataaatgcgaaggacaccatttcatcaccgccagatcggcaaaaatgacaaggacggcaagagttacaccgtaccatatgatattatcgtcacgtatatgccacagctttaaaaaatcgtgaatgtcggtaaaaaagaaaaagccgataatagctgaaaccgccaatatgagcaattgggtggcgtacagctgcatcacaatctcccggtctgagagctgccggatcaattcgctttgccgtctcagctgaactcacccgcagactctgatccgaaaatccggcctaattccagcttccaatcttcaaaccgttccatatttttacgttctcctttttgctcgtacggagccagatcaagtccgcagctgctgcagcattgtccggtttgaccatcaggctcatacggttcatcaaaataagacagcagcgcttctcttatacattctttccgctctaataacgccgaaaaacgattcattttacgcagcttcttttccacgcggtatgtcagttcttcctgcagttgctcttttgtggtttttccttgcagatacagatggacggccgttcgcgcctgtgtttcctggacgcccttattgatcagaacgtcccgaagctttcgttcatcacccgtaccggcatcccgtatgacggccagaatgccttccaggtcataatcagacaggctttctgtctgaataatctgctgctgaagctcggtatcgccgggcgccctcagcaaaatactgacactcgggctgccgtcgcgtcccgctctgccgatttcctgcataaaggcctcggccgtttggggaggataaaagtgaatgacaaagcggatatctgacttatccacacccatgccgaacgcattggtgcagcagatgcaatcaagctggttatggataaattgctgctggattaaaatcctgtcgcctgtatccattccgccgtgataataatccgtccgctttcccgttttttcgttcagctcagccgcaagctcttccgcccattttctggtcggacaatatatgatacccgggccttcaagcttttcggcaagctccgtgagcctgcttattttttcggcattatcagccaaatgttctgccgccaggagaatattcggccggttgactgaataaagatgacgcaccgcatgctcaagtccgagcacatccgtcacgtctctgagcgtttcttttgtcgctgttgcggtcagcgccaatacaggcggctttccgagtgcctgcctgaaaggtccgagcttcgaataatcaggcctgaaatcatgtccccattctgatatgcaatgagcctcatcaataacaaataaactgaccgagacatttttcaaacggttcagcacataaggtgaagaaagggcttcaggagacatatagagaaatttataacggctgatgttgctgaggataaaatgccgctctgcggaattcagcatgctgtttaatgcagcaacccgcttttctcctttcgctttcagctgctgcacctgatcttccattaatgaaaggagcggcgaaataatcagcaccagcccgtccatcatgtaacccgggagctgatagcataatgattttcccccgccggtcggaagcatggcgatcgtatcttttttttggagcacgctagtcataatctcttcctgcccttttttaaaggaatgcaaaccaaaatacctggataaagctttatgcagctcagtcatgctgattcaccgtctttgccagcgccagcctgatctgaaaatagctgaagcgcatctgcattccttcgcgaatccgtttaattttattcgtttgatgctgttttgcaaatgccgttatcatacgctgttcctcttcagaaagatactgttctataaaaaatgcaggctgatgcaatgatatttctacgatatgatcttcgattgtggcggtttttaaatttctgaccgcggcgatccgttcaatcggaaaccctttttccaacagctcaaaggtttttctggcagactgtgtcagcgcgctttccgcctgcagatcggacaacagctcacgcagagcgggatatgcacattgcggaagcgattgaataacataatgtaccgctccccaaaactggacggacacataccattcatcttcgttcagctggagagcaagctgcttattcgttttgccgattctgttgaatgaagttaaagaatagacaaaaataagcgcctgccgttcacttacgccttgcagaaggtgaaacagcgtctcatgcatttggacggaaagctctttagcatctctgtttttccgcatgaaccgtttgacccatctcagcgtctgcacatcgtttgtaaccgggatatattgactgcattgatgctctttgtttgacaggacttgaatgagcagggaaagccgcctccacagggtaacggcaggcgtttgataattcgcgccgtggcagtgcttcggccaaggccgctcggcaaacgcccgttcaagcctttgaacgccgcgcgcagtcactttccacgttccctcttcttttccggctgtaatgtatgagttctcggtgagtttatgcaaagaagccgcaatatcgccgcgttcacaatgtgaagccatgccgaaatatttagcgatctgaaataagccggcatcctgaatggtttgagacgacttttttccttttaataaatgaaacacagcactcggagtccgttcgccgtctattttgtccagacagtcgagaaccacggtatcaaagtagtttatcgccaatctaaacacacctacatttcttctgtgacaagtttcgttttttggttctttttattttaacagattttcatataaatttgacgtttaaagtcatcttttagggggaagtgctaaagagaatcccttatgtgataagcattctcaatcatttttctgttgaaatttgacactaacatcattacaataagtaagaggaataggtgttatatttgaaaatatataaggtaaaccatttgttccaacacgaacaatctgggaggttttattcatggcaaagtacacaattgtagataaagatacgtgtattgcatgcggcgcctgcggagctgcggcaccagacatttatgattatgatgatgaaggcattgcgttcgttacgcttgacgaaaataaaggcgtcgtcgaagttccggaagttctggaagaagatatgattgacgcatttgaaggatgccctactgattcaatcaaagttgcggatgaaccgttcgaaggcgacccgctgaaatacgaataaaaaagccctccccgtgagaggagctttttcgtcctgaataagactccggctgttattggccggagtcttatttttttgcgtgatcaaacaatcaaaaaagcgcccggtctgtgttttacagagcgggcgctttgaagtggttattgtgtctggatgctgcgtttttgttcaatccaaggtttcagcttcgtaaagatgaacgtaaagacgatggtgatgataacgccttttacaatgttaaacggcaggattcctgcgacaaccgccgtttttaactggctgtttgacagtaccggtgaatgtaaaaaccaagtatacgcgggcaggataagaatatagttcaaaatactcatcaatacagtcatcgctgcggttccggccagcaggctcactgcaagtcctttagcagatttgagctttttaaacataaacgccgtcggcagaataaacagcgttcctgcgataaaattggctgcctgcccgacaggcacgccggccatgcttccttgaatgatatactgcagaatatttttaatcgcttcaaccgcaatccccgccgcaggcccgtaaaccaaaatggcgataattgcaggaacgtcactgaaatcaattttcaagtaatccggcagccccggaaacgggaaatttaacagcataagcacaaaagcaatactgctaagcatactgatgacaactaatttttttactttcacaatgctctctccttttcgatcaaatctctcgaaaagaggaaaggttcttttgcgccccaataaaaaaaccgcttttgttaaaaagcgggagcttactaaggcttggcaaagaaacgtttgatataagcatcaaaacgtctgctgaacctccatcttctcccatccagactatactgtcggctccggaatctcaccggatcctgccgccgaagcagctcgcgggcttagagcatgatgctcatcaccgccggtagggaatttcaccctgccccgaagattgatcttatgaatttattcacattatatatgatcaaattgcaattgtatagagaactgctcaaatttaaataaaatattggggaagcccaatttaagctgattcagcggtttccttttctcctttactgcgtcaatacacattgacactctattgagaatatgataaattatcagatatttagtcagctaaactaggaggaaatctaacaatgtttcgagttttggtctcagataagatgagcaatgacggcttaaagccgctgatggaatcagactttatagaaattgttcaaaaaaacgtcgcggatgcagaagatgaattacatacctttgatgccctgttagtccgcagtgccacgaaagtaaccgaagaattgtataaaaaaatgacctctttaaaaatcgtcggcagagccggtgtcggcgtagacaacatcgacattgatgaggccacaaaacatggggttatcgtgataaacgcgccgaatggaaacaccatttcaacggcagagcatacattcgcgatgatttcttcattaatgagacacattccgcaagccaatatctcagtaaaatcaagagaatggaaccggacggcttttgtcggggcggagctctacggaaagactttaggcattgtcggtctgggccggatcggaagcgagattgcccagcgcgccagagcgttcggtatgacggttcatgtattcgatcctttcttaaccgaagagagagccggcaaaatcggcgtaaacagccggacattcgaagaagtgcttgaaagcgcggatatcattaccgtccacacgcctttaacaaaggaaacaaaaggactgcttaacagagaaaccattgccaaaacgaaaaaaggcgtccgtcttatcaactgcgcaagaggcggcattattgatgaagcggcgcttttggaagcgctggaaagcggccatgtcgcaggcgctgcccttgacgtgtttgaagtggaaccgccagttgaatcaaagcttcccgaccatccgctggtgatcgccacacctcacttaggcgcttcaacgaaagaagcacagctgaatgtcgctgcacaggtttctgaagaagtgctgcagtttgcaaaaggtctgcctgtcatgtcagcgatcaacctgcctgcgatgacgaaagatgaattcaaaaaaatccagccttatcaccaaattgccgataaaatcggaagtctcgtgtcacaatgtatgaaggaacccgtcaaagatgttgcgattcaatatgaaggcaccatcgccaaacttgaaacatcatttattacaaaaagcctgctgtccggtttcttaaaaccgcgtgtagactcaacggtcaatgaagtgaacgccggcggtgtagcaaaagaacgcggaatcagcttcagcgagaagatttcctccaatgaatcaggatatgataactgcatcagcgtaaaagtaaccggagaccggagcacatttacgttaacggctacgtatatccctcacttcggtgaacgaatcgttgagctgaacggctttaatattgacttaaatcctgccggccacctcgtttatatccagcaccaggatacgactggtgtaatcggacgcgtcggacgcatcctcggcgataacgatatcaatatcgctaccatgcaggtaggccgtaaagaaaaaggcggagaagccattatgatgctttcttttgataaacatttagatgataaagtcgtcaatgagctgacttcaattcaggatattgtttccgttaaactgattgaccttccgtaatcaacaaaaaacccaaaacattcatatgttttgggttttattacgtttaatggcttggaagcggattaggcgcggcaggcacagcgataggttttgtcacatcataattaccgattttctttgtatgcgcatgtgtgaacagcacctcagaataaccgaattccttcgcagttaacagaagtccttcgatcattaaaatcccttccagcgaatcttcaaccttatgtttttcggacaattgaatccgcagctgctcgccgtcttccctttccgataccgatgcaatcgcatctgcttctataatgctcgcagtctgtgagcctccgtctgttgtcttcatcccgtcaatagcctgatatactgaataataggtttgttcagacgggacgagatactcttgtcccagactgtcgctgtaagaaaaatacgcccggtttgtctgtttatgtacggacatctcagcggaaatgccgtaagatttataaaaatcctgtccggctccgttttgaacctttttcaatttaatccgctcgtaaggactccatgtcaaagtctctttcagcatctttttcaataagtcagcatcggcagctgattcgatagaaagccgtccgtttacctgcacaagcaaatccttcttatccgccgttacctgcacaccttccaaaaggttcggcacagacaggaaggattcgggcacttctaggtcttccgcttcggataaagcctctgataccgattcatccggcttctttttttcaaaactgaccggtatgacggcggatgtttctgaatcggcaaatgccaaagtaatgtaattgtttttgttttggtttgagacgacgaacgtcttctgatccggcggcttgacagaagctgactgactggctttttctgtctggcggctgtcagcggtaagatcaccggaagatttgtttgtcatcaggtgaggagatataatcagagcgatgcacaatgcgcagacgccggctgcggcggggccgatccagcttcgggccggttttttcctgtacggtttacccgtttcaatattccggtaaatggcctcgggtgaacgatgatctctaaccgccggaagttgtcttaacaactcctctactctttcttcgttccaatatgacttcatcatccattagctcctccctcaaaagctccatctgtttccgaagtattttgagccctctgtgttgggtcgttttgactttgctttccgagaagcggagagcggcggctgtttcctgaatggaatatccctgaataaatctcaagataataacagctctttgatcaatggtgcaatgatcaagcgcggtataaatttcccggacgttttcatgctgtacggcgagttcgtccggaagcaaatgctgatctctgacatcttgtgtatcccaatcaaacgtacccataatacgctgtctgatcgtctgctgcttgcggaaccagtcaatcgccacatggcgtgcgatggacaacagccatgttttttcactgcttcttccttcaaatgtatgataggaattcaagacgcggatatacacttcctgcgtcaaatcttcagcctgcgacttatcttttaccatataaaataaaaattgatataaatcttgatggtatgcatcatataatatctgaaaggtttcttccatgggaaacccctccgttcacttttttgtcgtaaaaatgcgttgaaaagttacattacaactatattacgagaaactggaatttggaagggaatttatattaacatattcttaaatttttaaaggagaaacaaataaaaaacacccgcagaacatgcgggtgtttcgtatggaacaagattgttcgtcaatttcagacgtcatcctgcgcttttgtcggaatataaaatgtaaacgtcgtccctttgtcgatgctgctgtgaaccgcaattgagccgccgtgggcttccacgatattttttacgatggcgagtccgagtccggttcccgccctgcctcttgttcttgctttgtccgctttataaaaacgttcaaaaataaaaggcagatcctcttccggtattcccgagccggaatctttgatatcgattttcagtccgtcttttacggtctgagccgcgatatgaacgcttccgcctgactccgtatggcgcagcgcattatctataaggttggtaaacacctgttccattttgtcttcatcaaagacacactccggctgagacactgagatgtcctctgtgagcgaaacacctttttccttcgctaccccggaaaatttgcgggagatcttctccagaaattcatgcaggtttaccgtttcatagtgcaggcccgtatgtccggattccattctggccaaatccagcaaatcattgacgagccggcccatgcgaagagattcatcataaatgatttgcgcgatttcttttttctcctcttcggtgcttgcaatgtcgtccactattgcttcgctgtatccctgcagcatagaaatcggggttctgagctcatgactgacattggcaatgaagtcttcacgcaatttatccagcctgcgctcttcggtcatatcacggagcacggccacggcgccgcggacgtgtgattccgcataaagaggcgacatcaataaaacccatgaccttccttgaagcgtcatttcaatcatttgctctttttccgtgttcactgcattttgaaatagctcttttgcttcagggggaaggttgtctccttctttaatgttcatgttctgctcataataccatgcctgcagaaaacgttcggccggcgggttggtcaccaaaatggtgccgtcgatattaatggtgatgaccccgtctgccatactgcttaaaatattggacagctgttctttttcctgattcagcgcgttaatatggaaattgagctgccgtcccatctgattaaaggcaatggccagttccccgatttcatcttgggtcagaatcggaatttttgtatcaaactttcctttcgccaagtcttgggcgccttcccgcattttccgaaggggatatgtcaccctgctggataaaaagaacgcgaaaaacgttgtcaagacgatggcaatgcccgccgcaagaaaaatatagcgtgtcgtatgtttcgtcgtatctttgacggcaagcagcgattgggataaaaaaaccatgccttttttgccgtctttttcatacggcactccgacgatcagccgttcgttatccgaaccggcattgttggggaccgcgcgtttgcttacttttttgcggtctgtcagcgccttgtgcagatcccggtcatgtttgatctgctctaatgtaatagaggataaatgattatcgtcattgggcgaataccagacatgcttatcatcctgaatgatcgcgatgctcgttaaattgtccgccagttcccacgtgatggatctggcaagcggctggtcttcatgattttctattatgaccgcaattttatcggcaagctgcgttaaatctttttccgcttcttcaacgtggtaattttctataaattccagaagcagcaccgttaaaataaataaaacaattaacacgagtgaaagaatggtaaaccaaagctttcctactacgcttttccaaaacttcattcagcgcctacctcaaatttgtatccgactccccatacggtgacgatttttttcgccgctcccggggacactttatttaatttttcacggagccgtttgacatgggtgtccaccgttctgaggtctccgaaaaattcatactgccacacttcttttaaaagcttttccctgtcgtacactttgtccggtgttttcgccaggaagtacagcagttcatattccttcggcgtcaggctcacctccgtgccgtccgcagtcaccctgtgagcatcgtgatcaatggatagatgcgaaaagacgagcacattttttgtcggggtattggctgtcagataagatgtttgggaagcccttcttaaaagcgcctttacccgaagcaccacttctctcggactgaaaggcttgacgatataatcgtccgtacccgcttcaaacccctggacgcggttggcttcttccccttttgccgtcagcatgataatcggcgtcgcttttttttctctgagctgccggcatacttcgattccgtccgttcccggcatcattaaatccaagagcaccagatcataatctgatgccagccccattttaatggcctcgtcgccgttttccgcttcttcaatcacatagttttcccgttcaaggtacattcttaaaaggcgtcgaattctggcttcatcatctactactaatattttagtttcatttgtttgatccatcgttttccccctgctttccttctgttactttcattttaacaaactgtgcggcagcttgagaactgtatcggctatttgcatctatgcgtacgaatgaagtccggcaagcacgagattcacaaaaatcaagttaaacataataatggcgaagccgatgacggcaagccacgcggacttttcgccatgccagcctcttgacagccgcaagtgcaaatacgctgcgtaaaataaaaaggtgatcagcgcccatacttccttcgggtcccagccccaaaaacgcgtccatgcaagctgcgcccaaatcatcgcaaacacaagcgcgccgagtgtgaataccggaaaaccgatggaaacagcgcggtagccgacttcatcgaccaagtccagattcacatttttgacgagcgggctgataagagcgctgattctctttctgaatatcagcctgagcgcaccgtataaaacgagacctgcgccaaacgaccagatcaccgtattgacctttctgcctgaaaaaatggccggaagctcaataagcggcttcattgcgccttccgtaagcagttctccctcatgcgggccgacaagcgcaggcatatcatatatcatgacgcttttggcttcttttttatccacccaattaaattcagctttgtagtccgccagccggaatgccgacgtgacggcaataaatgccacggtcgtcacgagtataaacatgatgacttcaagccagaacgtttttttccccggtctggattggtcgacatgctttaacaggaaaatgacgccggctacaaaactgatcgcaagaatcgcctgcccgagcgccgccgtcgtgacgtgaatgtacagccaattgctctgcagtgacggaataagcggcgtaatgtctgtcggaaacatgcttgcatatgcgataagcaaaagcgcgatagacaatgtgaacatgcctaatgaaggcagtctgtaaataaagtaaataataataaaagcgagaacaagcatcatgccgaatgacgtcgtaaattcaaacatattgctgacaggcgcatgtccgcttgccgaccatctcgcaatgaagtagccgagatgacaaagaaatccgaaaatggttaacgtgattccgatagccgaccagcggcccttaccgtccttagcaccttttgttccccggatggcgccgccgaaaaccgggacggcaattaaataaatcaaaaaggcagcataaagaaaatttgcgctcagctccgccatgacaccactcctttttcactaggcctgatttttggccaattctttttgatcggccggctcttgaatcccggtcccgctaagaacaaattcgatatcctttttcagaccgaaccagtttttgttcgtatgtcccgccacaagcacttcatgatcacctgttttgatccagatccttctgtgctgccagtacattccttgaatgacgccgatcataaagatcgcgccgccgacggcaagcacccataaggttaaatcttttctgacggtgagtcctgtaatgtttttcgtttccacatggtcgaattttaatttgtacttgttactttcggaaccttcaacagtctgctgaatcgcaacaaaacttttctcccctttcggcttgtcaggagccgtgattttaaagacaaaagccggattgttaggaaccttcgttttcgtgctcggttctccgtccttgttaaaataaaaatcaggaagataactggcgatctgcactttgtaaccgttaccaagatcatagtccgtgtcgggatcaagaagattgatcttcagtttgccgaatgactgttttgttttttggtcgatcagctgaaataccatctgatcgagctggttttctttatagtccacctgatatacagaataggagtcaaagcgcagcggttcattgacgcggatattgttttctttgactcttttaagcttcggcttttcaccgaatacaatgtcgcctttcctcttgtacaaaaccgcgtccgttgtgaaggatttggcgactttgccgtttccggctctgtcaatggcgtcggcgaatacttttttctcagtgtctttgttatatgtctgcatcgtgaaccggttgttttttaagtaatatttgccgtcagtacctgggatctgggcggtttcgccttcacggacccagagcgtttcatcgacatacataccgggtacaaatctcagcatggctccgatcagaaaaatgatcaggccgatatgattgacgtagggcccccaccttgaaaaacggcctttttccgccagaatgctgccctcttgttctcgcactctataatgcttttttttcaatcgtgttctgaggctatcagccgcatccccgctcagctcggtttctgtccggctgtatagacgctgcctcttcaaaaagaccggattccgccgaactccttgatttttcagcgccctgtacaaaggaatcacccggtccaggctgcagatgaccagtgatatgccaatagatgcgatcaggagcatataccaccatgagccgtacaggtgatgaaatcccaacagataatacatttggccgattatgccgtactgctgttcataatatgtatccggctgggcgcccggcggcagataagcttcctgcggaaaaaccgtgccgaaagcagacgccgccagagtaatgacgatcagccatattccgacttttacggaagaaaagaagttccataccttatctacgattgttttgttatatgtttgcgaacgccttgcgctgccgtcgtaccgcatatcggcaagcggcgatttttgatcatcaagcggcttcccgcacgactcgcacaaaaccgtcccggctggattcacgtgcccgcattcacatttgacctttttcatgaagacgcctccggcttaattaaattcatatagtcatgaaccatgcgttctgtcatcgtgccggtcaccactttcacgacttttccgtcgggattgatcaaaaatgtcgtcggaataggtgatacgccgtacgcgtccagcacttgccggtcagtatcgagcgcaaccgggaaattgacgccgtatgttttcataaaattatgtactgcaatttttgattcgccgacatttaccgcaaccacctcgacaccgaggtctttaaaatgcttgtattgattctccatgtagggaaattcctgcttgcacggctcacaccacgttccccagaaattcagaaaaacaccttttccttttaactgactcagttctatgagtctgccctctgtatctttcagcgcgaaattcggggctttggacccctcagatatacgctcaccgtttgtgtatacggcattatagatggtatatccgagcgcgcagagtaagatgagaaggatgccggtccgaatgaataaacgccgccgttttttgttcattgtacactgctcccctcccctgcctgcaaatccattcaattatatcatcaacacgttttgtaatttttgaaggttatgtgaaaattagaaagcgtttttaccgtgttcagctaaagcccgcagccttttcacctcatgcggcgacaattctcttgcgtctcctgtgcgcaggcctcttaaatctaaaaatgcgtattcttcacgttttagtttcagcacgtcatgaccgatcgcctcgaacatgcggcggacctgtctgttccggccttcatgaatcgtcagctgaatgatgctcgtctgctttcttttgtccagggaaagcattttcgctctggccggcgccgtcttgccttcttcaagctgaatgccgcgctcaagctttctcagaagttccttggaaggaatccccttcactttggcgacgtacgtcttatcaatttcgtatttcggatgcatgagtttgttggcaaactcgccgtcatttgtcagcaataaaagtccgctcgtatcataatcaagcctgccgatcggataaatgcgctgcggcacttctttgaagaagtcggtcaccactttccgccctttgtcgtcatcagctgctgagatcactcctctcggtttataaagcagaaagtacacgggttcttcccgctccacctttaatccgtttacttcaatctgatcagaaccggtcacttttacgccgagctctgttattacttttccattcacctttacttttccttcttttatcagctcttctgcctttctgcgtgatgccacgccggcatgagcaataactttttgcagtctttccatgtcgttcacctcaagtataatcttacttttttccccttgaacaaacaagctttttcaaggagagttattctgatatataaaaagcgcctgatttcaggcgcttccaaataataacgtaactatgatgattgatgcaaccaccccgatcaaatcagcaagaagaccaacctttaaagcatcccccatttttttgatgccgaccgccccgaaatacaccgtcaggacatacagcgtcgtgtcagtcgatccctgcatgaccgaggccagtctgccgataaatgaatcaggcccgtacacggcgatcagatcagtcgtcatgccgagcgccgccgtccccgaaatcgggcggatcagagcaagcggcacgacttctgcgggaatgccgagcgttgtaaagaaaggcttgcacagccccatgacaaaatccagcgcgcccgaggtccggaatacggtaatcgccaccagcatcccgaccaaatacggaatgatggaaaacgcaatctcaattccttcttttccgccttcaacgaatgattcatacgtcggcacttttttgatcgtgccgtatatcaatataccggcgataataatcggaatcatggctaaagacagccaattcaccatttccattcgcttacctcccttttcttttgcggcggtaccagaagtagcggtcaatgaaaatcgcgccgattcccgaaattaaagtcgctaagatggtcggcccgacgatatcggtcggtgatttcgccgagtaagccatgcgcacggcaatgacggttgtcggtatcaatgtaatactcgaagtatttaccgccaaaaaggtaatcatggaacggctggcctcagacttacctccattcagctttttcatctgctccatggctttaatgccgagcggtgtcgccgcatttcccagtccgaaaaagtttgccatgagatttgataaaatgtatcccatcgccggatgatcagggggaatatcgggaaacagcttagaaataaacgggcggcacattctgctgaatatatccaaaaggccggactgctcggctattttcatcaggccgagccagaacacgagaacgctcattaatccgaacgagatcgtaaccgcttctttcgctcctttaaaaacggcttcattcacatcctgcaaggtaccgttaaacatcgcaaagacaagtccgattaccgtcagacatacccagattaaattgaccatgacgaaccgcccgccgcgctcataaacaggctcgtaaacgtctcaatgaaatgctttttcggttttttatggcgctcattttcataatagacggggatcttggcgatcactttcccatcatgcataacagtcatccggccgacgacatcaggaatgagagaggcgtcctttttccaggcttttttcggttttattaaggttgtgcggatttttacatcgtcgatttcatcctcttttaacaaatatttgacatcccgggcaataaaagcgcgctttccgtaaaacgtctttttcagcttcgggatgccgccttttttagcgacgacataggttttatagtgctcaaagacataattaaacatattcatatgatcatcccaatcatccggatcatttatggtgaccgcgatgagatccgttccgtcttttgaggccgtcgagacgagcgtccgtttcgcgatttttgtgtaacctgtttttccgcctgtgctgtaacggtagagcccggtcagaagcttgtttttatttttccatacccggtccatcgtttccgccttatacacttttgtgcctgaaacggtccggtattccttgattttcatcgcgtatttagtcaaaagcgccatgtcatacgccgttgaatataaattttcatggtcgtccagcccgtgcggattttgaaattttgtattttccatcccgatttgctcggcttttttgttcatcataaatacaaaaccgtcaaggcttccgccgacatattccgctattgccgcagcggcgtcatttcctgaccttaacataagcccgtatacgagatctttcagctttactttttgtcccggctgaagataaatggctgagccttccgtttttacggcattcggggaaaccgtcacggtctcttccatctttcctgattcaatcgccagcaccgccgtcatgattttcgtaatgcttgcaatccgccgcttatgatgttcatccttggcgaataacaccctgccagatgctccgtcgattataatcgcgctttttgcgctgacatgtatttgggcatgtgccgtattgccgtctgtaatggaaaaaagaataacaaaagtcaaaagaaatacggcagcttttttgagaaagcgcatgaatgctcacgtccttgttgtgggtttgtacaagtttatgcgcatgtccatgacttatgaataccaattgcatcactttcacataaaaaaaactctcccaaaaggaagagtttttatctgactgatgccatatttgagcctgatgcttcatattgcgccaattcttcccgcatgcgcagaaattcactgctgagcgaaagcagaaggctccgcagcgagtccggcacttgctggtagaattcaatcgcgctttggcctgtataagcggcgcggctgttttcgtaccatgtatcctttttcggcatgaaaaactcttccacgcactgatgatatactttatacagcgttttttccgctctcgcctcatgaaacggctcctgcattaaaagccgcctgcaggcttcctgggcgccttcgcaaaagacggtcatcctcctcagcacactgagcacgtcgcggcagtatgcctcatccgcctctccttgagcccgcatctccggcaaagttgtatgatttaaatagctgctgaccatcgtgacaacctcggctaaaaattcaccagtttcttcagtatgggccctcacaatcgaatttcccatttccgtccgtttccttcctctcttgtacgtcgtcatttgcgtcattcatcaatggcctttccctactatcgtatgatgaaaaacgattattatttaatatcctcaaaagtttggttgaagttttcaaagaataaatcggcttcctcctggagaacgtcttcctccgcattttcaggaagcggcgggagctcctccaatgtttttaagccgaattgttcaagaaataccggtgtcgtgccgtataaaatcgcccggccgggaccgtcggcgcggcccacctcacacagcagcgcttttgacacgaggctgtgcagaatccgctcagacttcacgccccggatatcttcaatttccgcccgtgtgatcggctgcttgtacgaaacgatcgccagcacttccaaagaagcctgtgacagcccttttgacggcacttcgattagttttttcaaataaggcacgaattcttttttcgttccaagcatatacgtatccgcatattcggtaagctcgatgcctctgtcgtcttccttgtactgagcggccacttcttccatgattccggccagttccgcttcttctatttcaagcaccgtcaccaattgctttttggtcagcccttcatcacccgccgcatacagcagggcttccacaatcgctttccaattcacgatatcaagcgccatgaatggattcactccccgtaatgtatatatctgaaaagttttcttcctgttcaatgataatctgctgatttttcatcagttccaggactgctaaaaacgtcacgacgagatggtccttttgccgagaaggaaaaagctccgtgaagtttaatcttctccccgccgtttttaagctttttacgatttcgttcattctgtcttcaatcggtatttcctgccttgtaatggtcgtttctttcggccgcgtgatttttttacgctgaagcaccttttgaaacgcgccgatcatgtcataaacggtcaccgacagcttctgctccgtctgtttgatttcttttgcatactcacttaaatcactcggcggctttgtaaatgacttttgtctttcttcttcccgctcttttaaatccttcgcagcggttttatactttctatactcaatcagcttttcaatcagctcgtcccgagggtcttcttcttcaagcatttcgtcttcaaacagctcttcctcttgtttcggaagcagcattctgcttttaatgctgagaagcgtcgccgccatgaccagatattcactggcgacatcaagttcaagctcttgcattgtatgtacatataataaatattgttcagtaatggttgccacgggtatgtcgtatatgtcgatttcaagacggttaatcagatgaagcagcaggtccaatgggccttcaaacgtatcaattttcacttgatattctaccattatctcaccattttcaatatcactctcattgccggaaaaactggctaccctttagtataatccaccgaaatgctctcgtccaatacttttatacacgtcctccgttatttagaaaatactgaaaaagaagatatacgcctatacctttaaaggcggatgcacatatgatagccgtgtaaacttgaaacaaagggaggctgatttcacatgagcggagcttgtttcggcggaggttttgcattaattgtcgttctgtttattttgctcgttgtcgtaggagcatcttacatctgctagttcctcaggcttcagacaccaagccgctcttttttccttttcatagcgctgtggtacactggttttagcataaaaggaggaagcggcttgtatcctaaagcttatatcggctttttggccgaatttcacgcatcaagagattattttgagtgtcatgaactgttagaggaatattggaaagaaagcccggctgaaaagcggagcattcattgggtcggcctgattcagcttgccgtcgctctgtatcaccagcgcaggggaaatgaagccggggcgaaacggctgattgccaacagcttacgtattctccggtctgaaaagcaggcggtctgttctctcggtctcagccacccgaagctgattgagctgatagaaacgctgtcagacgatatagaagcgggcctgccttacagaagtgttatgctgccgattacagatgaagccctgaaagaagcatgtcttgccgaatgccgccgaaagggctatacatgggggcaagacggcgtatcagatacctttcttattcataaacaccgcctgcgggacaggacggatgtcattaaggaacgcgaacgggaaattgagagaagaaaaaaaagcagaggctgacggtcagccctgctttttctatatcaaaacagctcccgaaaccgtgaagattccgggagcatttgtcagttattatatgagatatcctgatctttttgatgttgacagcgttcaaaaaagctttgcgttaattcattcggaacgagtgcctccgttttgaacagacgttttaaggcgtccatcatttgctttccgattccttgatggcggtgagaaggattcacgctgatatgccggatttcaacttctgagtcctttttttcgactccgatcgctccgacgatatcttcatcctctttccaaagaaagagctggcggccagtatccgtttcatagtcctttattgtctgctgaagctgcttgagatctttttcattcggcataaatgacagaagacccatcgcaatcttttcaaacgattttttataacgaattaacataaaaacccctctatatccaaaatgtccattcatgtcctatcaaacggatacataaaggcgatccgtttcctcacattatatcattttcaccgctgttttaaacgcttttcaacaaattattcaaatgaacggtttaaatttgccatttcaatggcagatactgcgcaatccgctcccttatttccggcttttgttccggctcgttcgatggcctgctcaatggtttcagtcgtcacgatgccgaagataaccgggacgcccgtcgccgttcccgcctgggcgatgccttttgccgcttcattgcagacatagtcataatgcgttgtcgctcctctgataaccgtgccgagcgtaatgacggcatcgtattttttcgtttccgccattttctttgccgcaaacgggatttcaaacgctcccggcacccaagcgacgtcaatgtcgtttgattctacaccgtggcgaagcaacgtgtcttccgctccgcttaacagcttgctcgtaataaattcattaaatctgccgacgacgattccgattttaagtcctgttcctactaggtttccttgtatgatattcatatgttatccatccttttttgtgagattagtttttagaaatgaagcagatgtccaagttttttcattttggtctgtaaatattgcttgttatgctcactcgcctccatttgaagcggcacccgttctgaaatgctgagaccgtatccttcgaggccggcaattttccgggggttattggttaaaagtttcatatgctgaacccctaagtcgcggagaatctgggcgccgatgccgtagttgcgcagatcaggcagaaagccgagcgcttcgttcgcttcaaccgtgtcgtacccttgttcctgcaatcggtacgccttcagcttattgattaaaccgattcctctgccttcctggcgcaaatacaatagaacgccgcggccttcttcagcaatttgcgcaagcgcggcatgaagctgaggtccgcaatcacagcgatgggatgcaaacacatcgcccgtcaggcattctgagtgcactctgacaagaacgggttcgctgttaaacgggacatcccccatgacaaaggcgaggtgttcttttccgtcaacctcgtttgtatatccgtaaactctaaacgtgccgaagtcagtcggcagcgtaatatcaacttctctgttcacaagtgtcgtaatgttgtaacggtactctattaagtcttttatcgtaatcattttcagctggtggcgttcggcgatttcggctaactccggcactctggccattgtgccgtcttcattcataatttcacaaatgacgcccgctccctgagatccgcaggcttttgcaaggtcaacggctgcttccgtatggccggcccgcttcaggacgcctcctttttttgcgattaaggggaaaatgtggcccggacgctgaaaatcgtcagacacagattcttcgttcaacagcgcctgaatggtaaaggatcgttcctgcgcgctgatgcccgtttttgtcagcctgtggtcaatactgaccgtaaacgcggtctcatgtgagtccgtattatgatcgaccatcgggtgaagatccagccggccggcgatgtcttcagacagcggcgtgcagatcaggcctctcccatgggtcgccataaaattcaccacttccggcgtggcatgctcagccagcgctacgaagtctccttcgttttctctgtcttcatcatcgacaacaatgatgacttcaccttttttcagcgcctctaacgcctcttctatcggatgaaacatatcgatcttcctttctaaaagccgttctcgcttaaaaaggcttccgtgatagtttgattgcttttcgtttgttctgttttgtgcaaaaagcggtataagtatttgccgatcatgtcacactcaatatttacggtcgatccgactgttttcgtctgaaaaatcgtttctgagatggtatgcggaatgatggataccgtcacgctttcgtctgataaaccgaaaatcgtcaggctcacgccgtctaccgtaattgaacctttcaatacgagcgtttttgtcaattccggcgaaagttttaaatcgtaatagaccgcgttgctttttttctcgatccgcgtaatttccgccgttccgtccacgtgccctgatacaaagtggccgccgaaccgtccgttggcggacatcgctctttccaggtttactttactgccttttgacaagccgttcagcgaagtggttttcactgtttccggcatgacatcaaccgtaaattgattgtcagaaaatccggttacggtcaggcagatgccgtttaccgcaatgctgtcgccaagcttcacatcacttgtcacttttgaagcggcgatggttaatgccatggaaaggcctgtctttttgattgcttggatcgtgcctgtttcttcaacgattcctgtaaacatcgtcaccatcctttccatctttaggtatggccgtcagttttatatccggcccgatttgggtgatttgtgtgaattgtaaatgggggacatctttcattgattgaaaaccttcaccggagatcaagctgggagcaagcgttcctccgattaatttaggggcgaaatagaaatgaagctcttggaaacagccttccttgacaaaacttccgtgtacggatgctccgccttccacataaacggacattatgccgttttcagcgagaatactgagcacctcagggacgtgaatgcggtctgtttccagcggaataacttttattccgagtgcggtcagccggtctttcttttgcatgtctgcacctttggccgtaaatatccatgtcggcgcagcgccgtcagtgagcacatttgccgtttcaggaatggtcagctttgtatcgagaatcactctgaccggctgcttcaccgcatcaggaagcctgcaggtcaggctcggattatcggctttgactgtgcctgctccgacaagaatgctttgatgcgatttcctgtattgctgggcatcaagccttgccgcctctgatgtaatccatttgctgtcaccggtttcagtcgctgttttcccgtcaaggctcgcggccgctttcaaggtgacatacggaagtccggtccgcatgaagtgaagaaacattttattcagctcttctgcctgctgcctgagaagtccggttttcacttcgatgcccgctgcttccagcattccgatgccttttccggctacaagcggattcggatctttcacagcaatgaacaccctttttatccccgactttattatcagttcggcgcatggcggtgtttttccgtaatggctgcaaggctccagcgtcacatacaaatcggcgccttttgcgtgtctgccggccatatgaatcgcgtgaacctcggcatgcgcttctccgtattgcaaatgggcgcccattccgacgatctgtccgtttttgacgacgacagcgccgacaagaggattggactgtgtctgtccttcaccgcgcctggcaagttctattgccgtattcatataatattcttccatcgttatccctcccttcttccacgcaatttggcgtcaaaaaagccccgaatgtttacacagttcggggctttgccagttttaatccataggaaataagactatacagtaagtttattttttgcatagcttctctcatccttctcccatccagactttcactgtcggcttcagcttttcactgaatccaccgtatacagatgcatacgggtcacgggctgtaaagcgcaaaacgccttattaccgccggtcgggattttcacccagccccgaaggatacaatcaatatttttttgtccttatccgctattataacatcctttgcggcaggcgcaatgaatttgcacctaattattcagaaaaataaaaagcgcccttttcccataaaaggcgcctttatttattcgttcactttgacgaccttcaataagccgtcaatccggtttgatttgctgaaatacgctttaatcttatctccctttttcacatcggagagatcctgcttcagcttgtcgccgttaaaaataatttttgtgccgttttctgccgtaccgtggtactcagttccttcgattttcgtaattttatatgttttgactgtatattcttctttttcctgggacagggtttgtccgattgcagtcggcacgtctttcagttcaatatcgtttatgaccatataaccgcccgctaataacagcagcagtacaagtaaaatggctgcttttgttttaattcttcccatttttctacctccagcccgtatcaatctattcattactatgtcatattcctttttttcatgaatagaaaaccgttcttccctgcgtgagttattcatataacgtttcataaagggaagatgtttcatgtatctgtaaaactttctatctattaaatagatatacgaatttatgttctgtttttgagggtggaaagataaatttatataaaaaagcagttttcctcatgaagaaaactgcctgtacggtttatttcgtcttgcgaatttcattaaacgggaagaagacgaattttgatgtgcccgctatttgttttttcgtaaaaagaccgaggccgttgcggctgtccatagattctctgcggttatcacccatgacgaaatatttgtcgtccggcaccttcaccgggccgaagtcttctgtcagccggtcatagccgtcttgcttcgccttgtgcttatttgccgctaaatacggttcggacacttttttgccgttgatgtacagctggtcgtttttcatttgcaccgtgtcgccgggaagtccgataatccgcttgacatagtgttcgttttctccgttcagaacgacgatctggccgcgtttgaagtcgcttatgtatttgaccgtcatattgacaaagattctctcgcggtcatgcagcgtcggatccattgattcgccatcaacgagataaggggcaaataaaaagtttcggatgagcagtgccagaacgacagcgatgataatggctttcgcccaatcaagtacggcgctttttttagaagttttttctttttctgatttcaagtgatttcctcccattagccatggtcgtttttattttaccatgaatccctgcacagagggcaaataagccccgcacctcatccatttttttcattttataagccggatctgctgattttacggtatttcacgaagcttccgatccgccaaatgcacaaatacacaaaagcaagttccatcgttaaaacggcgaattccgccgcgtcaatgtttttgaaatattggctgagcacgatacggatcgcaataatcgcgataatgacatatttaaagtttttattccgcttggagtagacaaagccgtcttcccggatttcataggcggtttgcgacagcatgatgacaccgaataccgcgcctaacagtccggcgatggcgagctcccaaagagcgggaaaatgaaacggctttcccgggatattcatgagctggctgatgctgaatgtaaaaatgacggcgataatcaaaagcgggagaatgatgccgaagccgccgcctttaatcggcctgttcccctttttcaccctgaaccaaattataagtgcgagaatgataatgacaaataaaacggttgccaattgaaccaacgtttctacctcttttcattgttgtaatcggtctttatcactataccagaggaactactatcattcatatatgtattttttcatgatttacacatgagaattttcatatacataaaaaaacccgcctgaaaaaggcgggttttccgtcattatccttctacacggatttctttcattttgtctccgttagacatgtttttcgcatgctctaaaccgcttgtcacttttccgaatacagtatgaacgccgtttaaatgcggctgcggctcatgtacgatgaagaattggcttgaacccgtgtctttaccggcatgcgccatcgataaagaaccggcttcgtgcttatgcggattgccttctgtttcacatttgatcgtttttccgcttccgcccatgcctgtcccagtcggatctccgccttggctgacaaagcccggaatcacgcggtggaaaataacgccgtcataaaagcccgtattcgccaggttttcaaagttagcgactgtattaggcgcttcattcggataaagttcaaattcgattctgctgccgttttccatttcgatataaccagttttcattctcattcctacttccgtattgttttttgtcaaagccttcttcaatatgaatttcaattgtaagccggctttctttttgatattcttttgaaggaagaggcctctgctcttcttttcgcggctattataccacaccttcagccggaaaacgaatctccccgcttccgcagaaagaaaatgaaaccagaacagcttcacagccgtctatgtatcggaactgcttcacgcaggccctcacaaaccgcttcaaaacggcatttgtgaaaagaaggaggttaaccgctttgaaaaaaatgtggattggattgctggcggcggccgttgtattgtgcacaataccgaaaatcagcctggccgatgccgcagtcggagatgtcatcgtcacactgggggcggatctgtcaaacgaaaaccgtcagaaagtgcttgacgaattaaatgtccctgataacgcgacaaaagtgacggtcacgaataaagaagaacatgaatatctgggaaaatatatatcgaatgcccaaatcggcacaagagccatctcttcatcatccatcacggtggcaaagaaaggggccgggcttgacgttaagacccataatatcgattccatcacggatgaaatgtacttaaacgccctgatgacagcaggagtgaaagatgcgaaagtatacgtgacggcgccgtttgaggtatcaggcaccgcagcattaacgggaattatcaaggcatatgaagtctcatcagacaaagcgatatcagaagatgtaaaacaggtcgccaaccaagagcttgtcaccacttcaaatctcggggataaaatcggggataaaaacgcctccgcgctcatcgcaaacattaaagatgatttcgcgaaaaacggtgtgcccgatacaaaagaaggaatcgagaaaaaggtcgatgatgcggcttcaaaccttaacattacactgactgacgctcaaaaagaccagctcgtttcattgtttaataaaatgaaaaatgccaagattgattggggccaagtcggcagccagcttgacaaggcaaaagacaaaatcacgaagttcatacaatccgatgaaggcaaaagctttgttcaaaaagtcattgatttcttcgcttcgatttggaatgcgatcgtgtctgtatttacaggagacagcggatcaagttctaacagctgaatgcaaaaagagaccggacgccattgttccggtctcttttttatttattgtttgacccccgtcttaaacggcagatccagttttacaatgtcttcataagtttcccttctaatgacaagatgcgcttcgccgtcttccacaaaaacgacggcgggacgcggaatgcggttgtagttgttagccatgctgtatccgtatgctcccgtgcagaaaacggcgagaagatcgccttctttcacttccggaagatctatatcccaaatgagcatatcaccgctttcacagcacttacccgcaatggataccgttttatcgtggtgttctccgattctgtttgccgatacggcttcatatttcgcctgatacagggcaggacggatattatcgctcatgcccccgtcaaccgctgcatatttacgggtgccgggcacttctttttgcgaaccgatggtataaagcgtcgttccggcgtctccgacgagcgagcgtcccggttcaatccagatctccggaatgtcaaaagcgtgcagcgctgcgttttcttttaccgcttcgataattttttccacataaacggcgggatgaaggggttcatcctcctccgtgtagcggatgccgaagccgccccctaaattcagcacttcagagacaaagccgaatgattctctccattcattcagttttgcgaagattttttctgcggccaacacaaagcccgccgtatcaaaaatttgcgatccgatgtggcagtgaacgccgagaaggcggatatggtctgactgtaatacttgttcaatcgccttttctatttgcccgttatgcagatcaaaaccgaatttggaatcttcctgtcccgttgtaatataatcatgcgtatgcgcctctacccccggagtgatccgcagaagcacatccattgtgcgccctgatttgcggcacagttccgcaagtaaggatatttcataaaaattatcaacgacgatgcagccgatttgatgatcgagcgccattttcaactcttcttcgcttttgttattgccgtgaaagtgaatcctgtcagccggaaaaccagccgcaaccgccgtaaacagctctccgccggatacaacgtccagtgagagcccctcctgctcagcgagctgtatcatcgcaacagaagaaaacgccttgctcgcgtacgcgacctgcgcctttaaatccgcgtcaatgaatgcctgtttaaagcttttagcgcgctcacgtattaaagccacatcgtaaacataaagaggcgtgccgtaatgctccgctaaatacagcgcgtccacacctccgatttccaaatgacctagtttgttttgtctgcttgtgccatgtaagaacaatgctcattccctctttctgatccgcatatgggtgaaaaggacagcttcttttgagctgtccttatacaagtcccgtataagttaagacatacaatatcataatcttctgtcggtttcaatgcgattatgaaccgcttggctgtctttgacggtctttcgggtgaacaatgctcggtctgactttggctcccggcactgtcgtccggacgagcacctgccacaacgccttgccgttaaacggtaaaaacggccataaatacggcgtgtgaaacgagcggatattcgccattatgatcagcagcaatgtaaaacctatcacaaagcctttcacttggaaaatggccacgagcaccattaagatgaggcgtatcattttattggcgaggctgagctcatagctcggcgtggtaaatgatccgatggcggcgatcgatacgtacagaatcacttctgctgaaaacagccccaccgctatggcgatttgaccgatcagcaccgccgcaatcagacccatggcggtggataaagcggtcggcgtatggatcgcggccatcctgagaaactcaatccccaaatcggccaaaaagatttgcagaatgatcgggatgtgcgtatttttatttaaaccgataaaatccaatctttcaggcagaagagacggttcgagaacaaagaggaaccaaatcggaagcagaacggttgaagcaataataccgaaaaacctgatccatcttaaaaatgtgcccactgaaggcgcctgcctgtattcttccgcatgctgaacatggtgaaatatcgttgtcggcgttatgatcacgctcggtgacgtatcgacgacgatgatgacgtgcccttccaaaatgtgattggctgccacatccggccgctctgtgtatctgaccatcggaaacggattgtagccttgtttgacgatgaattcctccaccgttttatcagccatcgtcaatccgtcaatgtcaatcgcattcacttcgttttcgacgatgctgacaaggtccgggtccgcgatgtcttctatatacacaatcgcaagatcggtcttagagcgctcgccgactttcgtaattttgacgcggagcctttcgtccctgattcgtcttctgatcaatgctgtattaatgacgatattttcaataaaaccgtctcttgccccgcggacgaccttttccgtatccggttcttcaggtgtgcgtccgggataacttctgacgtcaacgataaaggcgaagcccgcgtcttcaacgataaccgccacaagtccggaaagcacttgatccgttgcttcgtcgagcgttttgactttttgaacctgctgattgacaagcctgttttcaacaacgtcaatcgcttcatccgcattctcgtcataattattgacgtcgacgagctgttccattaaatgaatgataaacaaagtatcggttaatccgttgacaaagtaaatctggacttcccggtctaatactcgaactttgcggacgccgacatcatagctcgttcccataccgacgcggtctttaaaaaattgttcattttttctaggatcccggtacaccttgatcatgttttccggtttttccggcatggctttcgctcctttctaaaatgaattcgaccgccttcatcgtgatcggcgagcctttggatatgtcatcttttcttcccatcttacctatgtcgccgatgcccacaatgaggggaacgtccaatttatccagacaatacaccgtatctccgttcattctgtgctcgtccatttctctcattccggttttatcgacgccaaactccgtcacttctccatcacggtcaatggagacatcgactttcgtccattcagcctgatgggtcttagaagcgaccgcaatcacccccagcacttcaatgtcctgatgtgaggcgacatatttcagcgccgtttcgcccggcccttccccttgcaggcctgaatcgtcaaacatgacaaacaccgggtcattcggcgcggctttaatcagctgaacaagttcggggccgcttctcgttgacggattgccctttgattgggaaatacaccgtccgcctgctttttccgcggcatattcaattgttttggcggcgtatacgtccccgtctgtcacaagaatgaccttccgtttcgtcatcaggcattatcctttcggtttaaaaataacggctacaagaaatgcgaataaaatcgctgaagatataccggcggaagtaagttcaaaaatccccatggcgatcccgataaatccatgctcgtgagcttgatgcatggcgccgtgcaataagctgtgaccgaagctgacgatgggaaccgtcgcgcccgcgcctgcgaattcgataaatttgtcataaattccgaacccatctaacaaggcgccgataacgacaaaagttgtcatcacatgggcgggtgtcagtttaaaaatgtcaagcagcagctgaccgataatgcaaatgattcccccgcaaacaaaagccaacagatattccatttatgatgcacctcccgcccgctcaaataccacaccgtgcgcgatggtcggaatggtttccttctgctggatcattgtcggactcaaaagcgctcctgtcgcgacaacgagtaccctgtttagagtccccgcttttaattgattaaaaatatgtgtgtacgtaacaagcgcagagcaggcgcagccgcttccgcccgcaaacacctgctggtccggcgtatagatgagaagaccgcagtcatcgtgtttcgttcccacgggatagccttcttctttgagcaaatctttcacgatcggcgagccgacgcctgaaaggtctcccgttaaaatcagatcataatcatccgccgtgcggtttaagtcctgcaggtgctgtttgattgtgtcggcggcagcgggcgccatggcggaccccatatcgaacggatctgttattccgaggtcgcttacttttcccactgttgcgcttgtaatcttgatatcagaagggttttggctgatgatgaccgccccgccccccgtgaccgttgaagtggcggtatccggtttttgcccgccatactccgtcggattgcggaattgccgttctgccgtcgcgttatggctgctcgtggctgcgatcgcccggttcgcaaaaccgccgtcaatgagcgcggatgcgacggcaatcgtttccattgatgtcgaacaggcgccgaacagacagaggaacggaattttcagatgtctggcgacgtagttggcggtcacattttgatttaaaagatcccccgcgagtaacaaatcaatatcgctctttttcaaattctgtttttgcaaagcggagttgatggcatcttccattaactgacgttccgccatttcccagtttttctgattgcaatgcatttcatcgtatgtcttatcaaacagcgaaccgagcgggccgtctttttctttcggtccggctgccgtccccgccgcatttacaaataacgggttttcaaacacccaggtttgctttccggtcaatttcattttttctcctcctacgaaaacagtttttcacaagcaaaccgtatcaggcctacgatataggctgccacgacgccgaatacaatgacgtttcccgccaatttaaacatgtttgtcgctaccccgagcacgagtccttcacttctgtgttcgagagcggcgcttgtcatactgtttgcaaaacccgtcaccggcacggctgaacccgctccggcaaactgcccaagtctgtcataaatgccgaatccggtcaaaagggcggaaattaaaataagagtggcggccgtcgggttgcccgctgttttttcattaaaattaaaaaagtggatgtaaaagtcttgaagagcctgcccgatcagacagatcaaaccgccgatcagaaaggctttgacgcaattccaaacatatggcggtttcggctgatagtctttcacttttgttttgtaattttcttttaagtttgtcatgtcggttcctccttatgaatgatggataaaatacagccaatgaaataaagagccggctattttgccgaacacaatagccatcagcaatatgatgattttgctgccgaagccgatccgtttggcaagaatgggaagcacattcagcacttctgtaagcgcggcggccagcatgccgacaaacatgccggccaaaagcccgaccggaacggccagccattcagataaaaaaaaatgattcatatttaaggtttcccagccgccgaacacagctcctgaaataacagctccttcgtaggcctgtacaaagcgcattgtttttgtcagctgcataaggcgggggacgattcccataacggttaaaaaagccacaaagcctgcccccacggtcagccctccgccaagcccgacaaacataacgaaaagaatgctaacgatcatgcagatctttcatcgtctcttcattttcgtgcattgcgacataatgatcgagatcaagctgataattaaacatctcgacttccagcgggcttggctcttcattcaggcgttttttgaagatgtgattaaaaaagacgatcataccgagaccgaggccgatgctgtacggaatctgaagcagatacggatattcattccgttcgcccgttatgatttcatataaggcgatatgaacttctctcatactgacatcttcatgaaaattcataatggcaagacatgaaccgataaaaagcaggagccagacaccgacgaacaaaacggctgacagctgctttttctggtaatggatttccactatcgtttcagcgccgccgacggtctgtacatcaagagcgggaaaagcggtatgaatggttttcagcacttttatgatgtccagcacgacgatatttttgtcttttttcgtgaccttatacagcggcagtgccgacagtttttttttcagcttttgctgtcccgcgatctgcgcggcgtcgccgattgtgatgatatctccggtatgagccttcacgcggtggcgaagtctgagaaatattcgtctttccatcttgcatcaccatctttcgggtggttatatatgtagtatgcggttcacttttgttctcattcaccagcggcaaaagaccataaattaccaccgatgcacaaataaaaaaagccggcccgtaaaaggtcagctttccgtatgatccatctgcactttaatctgctttaatatttttttctccagcctcgatacctggacttgggaaatcccgagccgttcggctacttccgactgtgtctgatctttataatatctcagatagacaatgagtttttcccgttcttccaaatcactgatcgcttccttgagggcgattttgtcaaaccacttctcttctgaatgatcggcgatctgatcaagcagggtgatcgggtccccgtcattttcatacacggtctcatgaatggatgaaggcgcccgcaccgcttcctgcgcaagcaccacatcctccgcatcaatttctaaatggtccgcgatttcctggacggtcggcactcttccgtatgtttttgacagttcatctttcgcccggcgtattttattgccgagctcttttaaagatcttgatactttgacggttccgtcatcgcggatgaagcgctggatttctccgataatcatcggcacggcataagttgaaaaacggacatcataggacaaatcgaatttatcaacggattttaacaatccgatacagccgatctgaaacagatcgtccggctcatagcctctgtttaagaacctttgaacgacggaccacacaagacgcatgtttttttctatgaggaggtctcttgcctgctggtcgccctcttggctctttttgattaattctttgacttcatggtccttgagctgcgcgtttttggtgtttttcttaacctccacatccataacaaatctccttaattacaaagcgctttgctttttgataggtgttttgttaagcgtatcgtcgttcccatctccggcgaggaatcaatcgtgacatcatccatgaagttttccataatggtaaagcccattccggagcgctcaagctcgggttttgtcgtaaagagcggctggcgcgcttcctcaagatccgtgatcccgaggccttcgtcacgtatggtcagatagacgacatgatcctccagcgtaacggagatgtacacctttccgtcacagttttcttcatagccgtggatgatcgcgtttgttaccgcttctgatacgacggtcttgatttccgtcagctcatccatcgtcgggtcgagctgtgcgataaaagaagcaactgttacgcgcgcaaacgattcgttctgactgagggctgaaaattcaagatgcatctcgtttttcatgatgccacccccaacgttaaaagcgctttttgttctgattgttcgaacctgatgattttaaacaggccggacatgtcaaacagacgtctcaccgcgggcgaaatcgcgcacacgaccatttctccgccgagctgtttaatttgtttataacgccctaaaatcacgccgaggccggagctgtccatgaaggtaagatcttcaaggttcagcacgatgtgacggatgccgtcagcctccagcgattcagtaaccttttgttttaatgattctgccgtatgatggtcgagttcacctgttaatcgaatacaaagcacggattctttgacatgaaagtcaattccaaggctcatgctcattcctccttgatatgatcggataatgagtgtttcgattttcgggaaagcaattccttcactatgacaaaactagtgcccgttcgccacgattatttaaattttgtccaatctcccatcgtccgcttcagaaaagtgagaaaacccgctttttccatgtcgtcttttgccgtgaccgggctttcaacgagcacctttccgtcttttttcagaacgaggctgccgagcacttctccttttttaaccggagccgttacattgccgttgattttcacttctttttttactttgtccatgttctctccctttttggccagaagagaaatcggctcagatgtggtcagcttgatcagtttcttttttccttttttcacttttaccgttccgacgatttgagcccgtttgtacagcgggtgtgttttaaactggctgaaggcgtaatcaagcattttggtcacttgggcatttctttctttcggagtgctggctccgaaaacaacagcaatgaccctcatatttccttttttagcggtggcggttaaacaatacttcgcttcgcctgtaaagcccgtcttcacgccgtctacacccggataaaatttgatcagccggtttgtattgacgagccagaactttttgtctgtattttctcttaaataatcctcatacgttcccgtaaattgagtgattttatcatactttaataattccttcgccattttcgccatgtcataagcagagctgtaatggtctttttcaggcagtcccgtcgggtttttgaaggaggtatctttcaatcccaattcttttgcttttttgttcatccggctgacgaaatcctcttctgaaccggcaatatactccgccattgcgacagatgcgtcatttccggaagctatcgcaattcctttgagcatttcttttaccgtcatttcttctccgggttcaaggaaaatctgtgatccgcccatggacgcggcatgttcactcgtcctgactttatcgcccatctttattttccctttgtcaagcgcttccatgattaaaagcatggtcatgatttttgtcatgcttgccggcgccagacgctcccggctgttcttgttataaagaatgcttcccgtatcgcgttcaatcagcacggcgcttttggcttcatgagcgagctccgatgtatgttttccgtccggctttgcaaaagcggacggtgctgatgccgttaataaaatgccaatcaacaaagtggatataagacgtttcatctccaaagccctccatttcataatcctttttattttttccaaatccggtggttttatacgcctcatctggaaaatgtttcgtgttgagggcacaaaaaaacagctgcttccgaagaaacagctgacttatgctgacttatttttgagatcgtgcgactacggcttttacaagcttcaaaaagccgccttttactttttccgtcatttccattacttcttcatgggataacggctggtcaagaatacctgccgccgcgttggaaatgcatgagatgccgagcacgcgcatccccgcgtggttggcgacgatgacttccggcacagtcgacatgccgacagcgtcagaacccatcgttcttaaaaaccgaacctcagcaggcgtttcgtaagacggccccgtaacagctgtatacactcctttttgaacaggaatgcctagctcatcggccgttttttcagccaagcctgacagctctttgtcataggcttctgacatgtccgggaatctcggtccgaattcagcttcgttcggcccgattaacgggttggtgcccgtaaagttgatgtggtctgtaataatcatcagatcgccggcgcggaattcagtgttgataccgccggctgcattcgtcacgacgagagattcaacgccgagcgccttcatcacgcggacgggaaatgtgacctgatccattgagtagccttcatagtaatgaaagcggccctgcatcgcgatgacctgcacaccttcaagcgttcccatcacaagctggccggcatggccttctaccgttgagaccggaaaatcagggatcgtttcatatgtaatcttgacagctccttcaatttcatcggccaatacgccgagccctgaccctaaaatcagaccgatctttggtgtttctttcacgtgttctttaataaatgcagcagcacgttcgatcttttgtttcaaaaaaagtccccctactgtaatcttgataaaaagctttttccgtattccggcttttccgttttgaaattatccgcaatggttgcgccgatatcggcaaatgtatccgcaagcggcagctgttcagtgtgtttgtgctttttgctgtacacaagaagcggcacatactccctcgtgtgatctgtgccgtgatgaacaggatcattgccgtgatccgcagtgatgataagcagatcgtcttctttcattttctcaaacacttccggaagcctcgcgtcgaattcctcgagcgcttttccgtacccttccggatcgcggcggtgtccgtacagcgcgtcaaaatcaacgaggttggcaaagctcagacccgtaaactcttcaccgagcgtttcaatcactttgtccatgccgtccatattagataccgtgcggcgggaagatgtaatgccttctccgtcataaatatcagaaattttgccgatggaaatgacgtctaatccgctgtctttcattccgttcattaccgtgcggccgaacggtttgagcgcataatcatgacggttcggcgtgcgtttgaagctgcccggttctccgacgaacggtcttgcgataatccggccgaccatgtatttcggatcaagcgtcagttctctggccgtttcacagatgctgtacagttcgtcaagcggaacgacatcttcgtgagccgcaatctgcagtacggaatctgctgatgtataaacgatcagcgcacccgtttccatatgttcttttccgagctcgtccagaatcgccgtgcctgaagccggcttatttccgatgattttccgtcctgaacgccgctcaagttcctgaagaagttcatccggaaatccttccgggaacactttaaacggtttttcaatgtagaggcccataatctcccagtgccccgtcatcgtatctttcccgtttgacgcctcctgcatttttccgtagtacgcaagagggtgctccgttttttccacgcccttaatgtctccgatcagtccgagaccgagctgcgccaaatggggcatatgtaagccgttcatgtgctctgcgatgtgtccgagcgtatttgcgcctatatcattaaaatcggcggcgtccggcgcttcaccgattccgacagaatccattacgatcaaaaatacccggttatatttgtattcagacatcataaaagcctccttttcttccatctgtccattgtagcttacagaggtcagacaactcaagtataaaccgtttacattcttgttgacaatgccgattcaaataattagaaccttctctgtattccgccaatccggcaaaaaagccgcggcccctctggcagcggctcctaagcgcgcggatgatactgtttgtacacgtccttcagccttgttttcgtcacatgcgtataaatttgcgtggtggaaatatcggcatgtccgagcatctcctgcacggcgcgcagatccgccccgttttcgagcaggtgcgttgcaaaggagtgccggagcgtgtgcggtgtcagctcttttttaatccccgcttcaagtgcgattttttttaggtttttccagaatccctgacggctgatctgcctgccgtgatgattcagaaaaagcgcttcggttacgtttttctttaataatttccctctggctttttcaatgtatgcttctatcgcatgagaagcggcttcaccaatcggcacaatccgctctttccgcccttttccgaagcagcggacgaatcccatcgtcaaatggacgtcggataatttcagctcgatcatctcgctgaccctgatgccggtcgcgtacagcagttcaagcatggctttatccctaaggccgaacgggctgtcaagcttaggcgtgtccaataaccgctcaacttcgtgaagcgccaatactttcggaagcgtccgctctgttttttgtgtttcaatatgtaccgaaggatctttatccgcggctttttcccttaacagaaattgatgaaaagaccggatcgacgccaaatgcctggcagacgtcttgccggatttcccggagtcctttatatgctttaaatattgaataatatgaagacgggtcacatcattccatgaagtgatctgaaggctttcagttaagaagagagaataacttttcagatcacgctcataggacatcatcgtattttgggacagccctctttcaaccctcacataatggatgaaatccttaatttgatccttcactcttgatctactccccgttttggtaaaaaaagatcaatcggccgaaccagccgtctttatcctcttgttccgttttggccactttgacggcggagccttccggtttatcgtaccgatgatagttttcatactctgaattcacccatatcatagcataatagaacagcgcggtaaaacctgtgaacagaataaacactttgatcgtatccgcggctgtttttaggaatctgcccatctttcgatcgaccctttcttttggcggctgttagtacaccttatgccaatttcaaaggcttttatacataaaaacagcaaaaaaccctttcctggcagaaaaggttcgtaggcttttactctgtttcatccccgcggcagcggtggcagattccgtgaaaagtcaatctatgatctttaattttaaatttccaatcacgttcaatcacttcttcaacgtcttcaagcagatcttcttcaatttcatcgacggctccgcactccatgcacaccaaatggtgatgaaagtgagccgcgccttctttgcgaaggtcgtagcgggatacgccgtccccgaagttaattttatcaacgacttttaattctgttaataattctaatgtacggtatactgtagcgagaccaatttcaggagatttctcttttacgaggaggtatacatcttctgcgcttaaatggtcttcttcgttttcaagcagcactcttaccgttgcttcccgctgtggcgtaagcttgtagcttgacgagtgcagctgctttttaattcgatcaatacggttttccatgtctttccctcctacgccgcattccatgactcattataacaaaatacgcgcagagttccaactataattattataaactgataaataaaagtattattttgtgataatcattctaaaatatgcgtgatgacagcttttccataaacagcggagacacgtacgcctcgagcagcgaggcgatgaccgagaagaaaacgatgagaatcagcacgaaggcgtaacgtccgaaccattggatcggcgcgtcatgaaggctgcgtttgacaaacagctgccggatcagtttcagtgaaaaagcgatagagcatgtccccatggtaagatacgccggaatgagaacgatgttttgcggcagaaccgaaataaatgacaggaaaaacccgttcatccccatttgattcactaaaaaaccgaccgtgaagccgacgacgattccttttaagaacaccataatgaaaataaccggaagaccgatcacggaaataccgagaatccacatcagccccaaatatttcacatcatgaaagacggcctgccaaaacatttctgaagcgccggcatgttttccgtcagacagctgtccgaaaaacttgcttaaatagtaatacaaatcttctttctgcgtgatggtcatgctgttgacgatgatcgccccgaaaatgacccccatcaaaaacaagacgaacacaaatatataaagtgacagatgatcctttacatggcgaaaaaacagttctttgtacgattgttttctcataccgctttcctcccgctaatctattgacttgatttagtagattgtatgaaagaaaagagaaaacatgacagagaaatcatagaaaggcgcgagattcgggcataaaaaaagaacccccgtcatcactccggtgatcataggggtttctttttttatgctttattctttcgagcctgtcttttttggttttcgtcactctttcatgggtgctgaaagacggcgccgtcccccttgacaggactgcgtcacgcatcccgtttcttttgagatgctcccgcatttttttcgttttgctcttcgccatgtgccaaccgctcctttttcccttttctttatcataacaaaaaaatccggatgtgttcatgaatacggctcatgtttcgaccggtaagcgcgcagagacgttttggcagatgaatagctccccattgcggcgtatccgtaaaaaaaacccataaaaatccccgcatacacgtgttcatgatgaccgaaaacgatagacacaacatttccggcagcaagggcaatcgtgggaacgaatatgcccggaacccggcagaacactttgatcagctgtgtgacacataagacgaccggcacgccgatcacagcatcccaaatatttgtatggatcagcggaaaataatccacatcgacacctctttattccgtcttttgctatctgttagcctgcctaagaattccgcttcctattcatgataaaaaaacagcaccggcacatgtccggtactgtaagagttgtttatttccctgccgcggcccgttctacggctgctgatacggcttgatgcacgtccgcatccaaaggctgaggcacgagatcgccgtgtttcgtgcaagaggcgatggcttctgcggccgccacaagcatttcatggtcgattttcttgcttttggcgttcagcgcgccgcggaaaatccccgggaagccgagaacattattgaccgaacggccgtcagctgcataagcggctccggcttgtaatgcctcttccggttcaatctccggcttcggattagataaagccagaatgacgtgtccttttctgacatcctcttttttaatgagacccggaactcctgtggtgctgatcacaatgtcacacgtgtccattaattctttgatgcttccaagcggctgacctccgtactgagcgaggcggttcattgcgtcttctgacttgtccgttccgcagaccgctttgactccgtatgccataaacatgcggcagatggcgacgcctgccgcgccgagaccgatctgaccgaccttcgcttcttttaaatcaagaccggcgcttttacaagcggaaatggcggcggcgagcgtgacgaccgccgtgccgtgctggtcatcgtgcataaccggaatgtccagttcttctttcaggcggtcttcaatgtcaaagcagtggggcgaaccgatatcttcaagcagaattccgctgaaccccggagaaatatgttttaccgtgcgaatgatttcttccggatcagaggtatcgagcaaaatcggaattccgctgatacccgccagctggtcaaaaagcgcggctttcccttccattacgggcattccggcgacagagccgatattgccgaggccgagaatcgccgttccgtcggtgacaatggcgacagaattgctgattgtcgtatagatggacgctttttcaggctcgttttcaatcagtctgcacacatcggcgacacccggcgtataaacacgcccaagctcagccagtgtccggatcggcattttgcttttcatctgaattttgccgccttcatgagcagagagcacttcatctgagactgtatgaagccggatgccttcaccgagagcttcaatggcttgaatgatttcctgcagctgctcttcattttcggcctgcaccgtgatgttgcgcattgtgtagttcgggccgactttaacagtttcaacttccccgatatctccgcccatcactccgatggcggttgccacttttccgagatttccgggaacagtcggcgtttcaatcattaacgtccgaatcatatgctttgtaatcatgaaatgaacctcctaacccaatttttgagattgcaaggatttttctttcgtgtaccaaatgaatttccccgtgtacccgtacaatattgccagtccgatagatacaaaactgagccacatgaacggcagataagaaaatgtggatacgccgagaatgccggccatatagatgccgttatcagaccacggcaccatccctgaagtaagcgtgccgcccacctctgcgttccgggataaaactcttctgtcaagtttcagtttatcataactgttctccatgattttcggcgtcagaatcaatgacacgtacatcgcacagccgaaaatgtttcctaaaagggcgacgatcaatgtcgaaagcgtcacatttcccggtgtggtcagctttttctcaaaagttgagacaatcacttttaatacgccgagcttctcaagaattcctccaaaaccgagaccgaacaggataacgactaacgtatccagcataccggtaatgcctccgcggtttaacaggccgtttaaaaattcgacgtccgttttaatagaaaaaccattataagcagtcgcgatggcactggcaaaattcattccctgaaagacggaagcccagattgcgccaagcaaagcaccgatgacgataacgggcatagacggctttttcaaaatcagaaggacaacgacgacaacagccggaatgagcatccatatatgaatgtcaaacgttttctgcaatgaagattttaaaaattccactttgccgagatcaatattttttccgccgtatataaatcccgttacggtaaacagaatggccgtaataatataggacggaattgacagatacatcatcgctctgacgtgtgacagcacatccaccttagaaagcgtggaggcaagcaccgtactgtcagacagcggtgaaagcttgtctccgaagtaagcgccggacaaaacggctcccgctacgatcggaagcggtatacccattccctccccgatggcaatcatggcgatccctgcggttcccacggttccccacgacgttccggtcgcaacggacataacggaacaaataaccagtgtggccagaaggaaaatatgaggattaataaactctaaaccataataaattaacgtcggcacaacgccgccggcaatccatgtcccgatgagcgcaccgaccgaaacgagaatcaataccgcttcaagaccgtttgatatcccggtgacaatcgaagcctgcaagtctttatatgaatatcccagcctgactccgagaataatagcgaaaaaccaggatattaatagagctagctggatcggcaggtctaaaaacactgtgaacgataagacaagtgctaaaaacccgaataataagataataatttccaataaatttggcaatctggcctctttcacaagaaaatccccctagaagaaaaaagctaaaacgctttcatcaaatgatataacaaattatactatactgcctcatccctttgtatggcaaccgcctattcactaaaaaacgtgaaaaggcggctgttattgctttaaaatttatttttctaatagatcttttccggcaatccccggttttgtcatttcatatggattcaaaatgatatccaattcttcttctgtcagtacatcattttgaaggcaaagatctcttacagattgccccgtcatgattgcttcacgtgcaattcgcgcagccgcttcatacccgaggtgcggattgaccgctgtaatgacgccgacgcttttttccacgtattgcttcaggcgtttttcgttggcttcaattcccgccagacaatgatcggtaaatgaacggaacccgttattcatgatgctgatggattgaagcaggttaaatacgagtaccggctccattacgttaagctccagctggcccgcttctgaagcgaggcagatcgtattgtcattcccgatgacctggaaggcgatttggttgatcagctctgccattacagggttgactttcccaggcataatggatgatcccggctgacgggcgggcagtgaaatttccgcaagtcccgcgcgcggacccgaagccattaagcgcagatcgttggcgattttagacatgttcatcatgcatactttcaacgcggctgaaacttccgtatacgcatcagtgttttgtgtggcgtcaaccaaatggccggcgccgacaagcggcagtccgctgatgtcagccaggtgcttcacaacctgttctatgtagcgcggatcggcgttaagtcccgtacctacggccgttgcccccatgtttacttcatacagatgctggcgggattgtttaattcgctttatgtcacgctcaagcacgcggctgtatgcttcaaattcctgtccgagacggatcggcacagcgtcctgaaggtgtgtgcgccccattttaatgacagaatcaaattgtttcgctttatctttaaagacactgagcatatgcgccatcgtatcaaggagcttatccaaaagtttcaaggttgaaatatggattgccgtcggaaacacgtcgttcgtcgattgtgacatgttgacgtgtgtgttcgggctgaggtgaatgtattcaccttttttatgccccatgatttcaagagccctgttgccgattacttcgttggcattcatgttcatggacgttccggctcccccttggatcggatcgacgataaattggtcatgccattttccctcaagaatttcatctgcggcctgtacaatcgcatttccgattccttcatacagccgttttacatccatgttggcaagcgccgccgcttttttgacgatggcgagcgcattaatcatttcttcgtggatgcggtagccggtaatcggaaagttttctttcgcgcgcagcgtttgtattccgtaatacacatcagcttcaatttgtttttctccgaggaaatctttttcctgacgatattctttttgcgcgtttgtcatgctaaaaccctactttctctttgtggtagtcatgtttttacagtacaacgtcgtctgcgatcggtgtctccataatgtttttgacttcagccaagttgtgagactggccgagcgcccacattaatttcggcacgatggcttccgtgttcatatttctggagcggataatgagatcttgattgactcttcggccgacttcatagacgctcatgtcctctccttcttcaagacattgtgtcgtaatgacgacgacaatgccgctttcaatcatttcattgactttggcgagaatgtctcttccttcaaacggcacgccgccgctgccgtagctttcaatgacgattcctttgtacatgccctttaatgcgtcaaacatttccggtttcagccccgggtgtagcttgagcaggcacacgtccgtgcaaagtgaagtattgaccgtaaaagcatcgtcttttggcatgtgcacttgtttgttgtattcaattccgttttcggtaataaacgcgatatacggatagttaatgctctcaaatgcatcatagcttttcgttcttaatttaatggcgcgtgtgccttgaatgactctgccgtcaaatacgacgtatacgccgcccaccccttcacatgcgaagcggatcgcgtccgtgatattttttttggcatcggttttttgaaatgtaatcgggatttgcgaacccgtaatgacgatcggtttatcagcatgctgaagcatataagacagtgccgctgatgtataggccattgtgtctgttccgtgcgtaatgacgaacccgtcatatgcgtcatatttttctttgacagcatttgcgatttcggcccagtattcaggctgcatatttgtgctgtcgatgttcattaacgaatgggtttccatcgtgtaatcgttatcaagttttgatacgtaggttaacaattcgtctgctttcaccccgggtgcaagcccgttttctccttcgactgaggcgattgttcctccggttgttaacagcaataattttttcataccctgcacctcttcatccatttctcaagatgtgttaagcattcgcttttcgcatacttttaatcaaattatagacagacgaatgaaattaatcaagtgattattattcaattcgcgtacacttttgcatatcgatatgatataatttgctcaagtgaaaaggagcggttttgaatatgaatttagatcgtttaactgaactgagaaaaaagaaaaattggtctcttcaatatacggctgaccgtctcggcatcgccaaaagcacgtacgccgggtatgaatcaggataccggcgtccgtcattcgaggcgctgggcacgcttgccgatctgtttgacacgacgtgcgacgatttactcgggcgcactgaaaaaaaggcggagccgtttgcccagaccatcgaattaacaaacgccgcacaaggccgcggcacactgaccgttgacggacagccgctgaatcaggatgaaatcatcgaattgattgcgtttgtccgcacgaaaaagaaggtgcaggaggagctccgttaaaaaccggcttttacggcttgattctgccgtacgtccctccgcccccggcctcaaggacaagctgcccggtgcgcgctttatgaatgacagccgctattttaggctggacgacacgcgccaattcctcttcttgcgcctgatgaagaatcgccatctccgtcccgaaagcccgcttcagtttttctaacgttttcggcccgaccccgggaatgaactgcagcgggatttgatgaatatacggcggccgcggcacgcggctttttttcgggccgctcagttcctccagccgttcactgaccccttttgtcattgttttccccccgcactccggacatgcggaagctcctttttcaaccgggctgccgcagcggtcgcaagccgtccggtaatacttcccgagcttcgggttcagcccgtaattcgccgtgatttttcttccgtccttcccttttaaagccagcgaaaattccgtgaaattcgcttctttaagaagcatttcattatattctctgccgatttttcctaaggaatgcgcatcagaatttgttaaaaatgtatacggatcaagttctgttacccgcgaagccatgtcggtgtcacagcttaacccgagttccgccgcgtcaatgagcgacgggtcgaaaacctctgtcaaagaagatctgaccccttttccgtacaggcttttatgcggggtgaacatatgggcgggaataaacagcccgcccaattcctttgttttcctttgaagattcaaaccggtttcataaatgcgctgggaactgagatggatatttttaagcctttttgcaagccactcagaaaacatcttcatttcggcaagagacggcataaagacgagaacgtgaatcggcccgcggcatgtgtgatcatagatttcaagctcactgcccaacagaagcgtcgtattccgataccggatgccgccttctttcagctcacggtatctgccttcatcaattccgcgctcgatttcttctatgacttccggggaatggcagtcgatgatgcccaatagttcaattcccttcccctcactggcttcttctaaaatccggtgcagcgtcaacgttttggccccggtgattttgaccggttttcccgtataggtgcggccgatatgaatatgcagatccgcatagatggttttcatcatttttccttcagcgcttctttcagctggagatactgaatcgcgtaagccgtttttgcgtcatacaccctgcgggattcaatcagcttcacggcctcttcaagcgtgacctgcatgacttcgacaaattcatcctcatccagctctcgtttttcttccagcggcgaaagcccttccgcaagaaagagatgcacgatttcatcagcaaacccgggtgatgtataaaaagcggtgattttcgtcaaggtttccgccgtatatcccgtttcttcctcgagctctcttaacgccgtatgttccggctcttcccccttttcaagcttcccggccggaatttcaacgattgtccgttccagcggctttctgaactggttcaccaaaatgatttttccttcttcggttaccgcaagtacggccaccgctcccggatgtttgacgatttcccgcttgcttgtttttccgttcgggagctctacgtcctctaagtaaagatctatgactttcccgtcatacagcttttttttcgcaagtgttttttcttctaaatgtttcatcatgtcatctcccgttctgtctctctattatgcctcatatattttatcatacatgcatgagagggaggtgcttttcgattgaaggtgtaccggaaggataagagtatcgtattggtcggaaaggcgtgggaagtgcgggctaaactgaaagaatacggacggacattccgctatgtcggagattggatcaccgggccttaacagttgaaaacttcgcgcctttatattacggtcaataaaagactataaaaaggagcgaaacgatgagaaaacgcacactgggacattctgatttagaaataagcgaaatcgggctcggctgtatgtcgctgggcacggataaagctaaagcgctgtctattttggatgaagcgatcgagcttggaatcaattatttagataccgctgatctttatgatttcggcagaaatgaggaaattgtcggggaggccgtcaaaaaccgcaggcacgacatcattttagccacgaaagccggaaaccgctggaatgatgataaagacggctggcattgggacgcttccaaaggatacataaaagaagcggtcaaaaacagcctgcgccggctgaaaacggactatatcgacctttatcagctgcatggcggcacgatggaagaccatattgacgaaacgatcgaagcatttgaggacttaaaacaggaaggtgtcatccggtattacggcatttcctcgattcgtccgaatgttattaaagaatatgtgaaaaaatcaaatatcaccagcgttatgatgcaatacagcctgctggaccggcgtcccgaggagtggcttccccttttagaggagaacggaatcagcgtagtcgcaagagggcctgtcgctaaagggcttcttacggaaaaaccgcttgatcaagcggccgcaagcgtaaaagagaacggctatttaacatattcttttgcagaactggcagaaaccaaaaaagcgatcagcgctgccgcacctgacttgagcatgacggagctttctcttcaatacttgctgtcacagccggccgtcgcttctgtcatcaccggagccagctcacttgagcagctgagagaaaactgttcggctgcagaggccaggcgtttaagcagccaggaaatcaaagccctgcaataccatacaaaacgggacgtatacgaagcccatcgttcttaaacaataaaaccggcaccttttcggatgccggtttatttatatttgtgccaatcgagactgctttcattcagcagctcttcaaagcttttatgtttttctttttcttttcgttttctgatttgttccgccttttgctgcgcctgttttttctcgtcttcttccttcagctcacttttcatttgcaaaagcctggccttcagatcttcctccagatcgtcttttaagctgtgtttttctttaggcagctgctttttcatcattacgccccccgtatctgaatatggtgaagcaagtgtaccacggagcgccggaggccggcaacgttcacggtcctgaatagccggaggaaggatttttcatatgaaaggagggtgcctgtgtgaaaaaatggctggcggtgttcggttcggcttgcgcagtctttttggctgccggattcgcttttacgaatctgattatgtttatgaagaaaaagacggatgaagatatcatgaaaaaagaaacggcggacgggcatgatagatttgattcctttcaggccatggaaaaagaagaggccgtcatcctgtcacgccacgggtatgagatcaaaggcttttacatcgccccgcatcatacggcaaacaccatgattatttgtcacggcgttaccgtaaattcgttcaattcattgaaatacatggatttatttttagatttaggctggaatgtgctcgtatatgaccaccgcaggcacggaaaaagcggcggcagaacgacgagctacggctattttgaaaaagatgatttggaagaagccgtgaattgggtgagacacaaaaccggagacggcggtcaaatcggcatccacggggaatcgatgggggcggtgacggccttattatacgcgggcgggcatcaggatgaaaacggcgctgatttttatattgcggactgtccgttcgcaagctttcgcgatcagctcgcctacaggctgaaacgggagttccggctgcctccgtggccgcttctgcctttggctgatttctttttgcggatgagagaaggctaccgtatccgtgatgtatctcctctatcggttatcagccgcatccggcagcccgtgctgtttattcacagtaaggaagatgattatataccctccgcttgttccgaattgctgcaccgcagaaaacgcggccctaagatgctctatctggccgaatcgggcgggcatgccatgtcgtacaccaaaaatccggagagctaccgtaaagccgttcaaacctttttagataccatgacgcaaacgtaaaaaagcgaaagaacgtatgctggttctttcgctttcccgtcataaaacgtcggtaatcccgtccatattttctccgatccagtcaatggcgaggtcgattgtcgtaaactcctgcgctttgaaggtcatctcatcttgaagcagccagacatccttctgaacggattcagcgcctccgatggaccagtgcagcagactgtacgggtggttgttgttcagaaaggatacccacgttttatgctgtgccgtctgtttaatggctttcagcttttgattcactttccgtttctccctgctttactaatatgctcattctcgggctcagcatctctgccgggctttttaagacgagcgtttttgccttttcattgtaatcgattgtcatttcctcgtcaaaaaacactttttgtgaggtctggatgtaaagcggaagtccgttggtttcaatggcttcgcattgtcccgttaattcgtccgccagccagatggtcggcacgccgctcaccgcgcacccgcagccttctgcgtcatagcggagctgcgcttttttccccgggttggcgtccatcgcctgctgaagtgtgtgtttcgccgcatccgtcacatgtatttgcatagatgatcctccgtttttcattttcgccattgtagcataccgagccgctgtatgcattgtttctgctttctttacagcagcccgctctcccagacctttgcctcttgttcagccgccttgatccagtcatttttcccttcactatactttgccatatcgtatgggtacgtcttagcgaggtgccgtttcagttccatgtattgagccgctttttcaggctttgcggtgaggtaatcccggaacagcagatgacgcttcacgtccggatggcctgtttcgtatatgtgaacgtggtgtgtgcgcttgttgccgcctttttgaaagaaacgccggccctctatcccgttttcccctttcgcctcatagccgagtgcttccagttgcggactgaatcggtcagcgtccgaaatatctttaacctccgccagtatatcgatgacgggtttggcggccatccctgggatagaggtgctgccgatgtggctgacagaatgaagtgctgggccgaagattcggatcaagtccgtcttctctctttcaaatatttctttccattccggcttgtacggaacaacttccgctttcctcttcggataaagatgaaaaaacgagagggtcagcccttccggcgtctctatctgtccggcttctgtgaaacctgtttttaaatagagagagactgccggaacgttttggctggcggtagccgcctctattttttgggcgtcccgattttgatctatcacaaattgaagaagcgcccgtccgattcctttccgaaagccggacgggtgcaccgtcagcctgcatatgacaaggtcatatccctttttttcatacgaaatgacgcctgcaagctgatctttttccttgaaaccggcaaacgtctcccgtgaccgctgtatatcatcgggtgtttcatgcagggcgggaatgccgaaaaagccgatcagctctgcttctttttgataagcgcagcgctgaaccgccgcaatttcccgcgcggtctgttcttgtgtatgctgtaaaaatgtaatcaatcttccgccccttttgacgcaaacatccgctgtgactccgtcttcgtaatgcggaccgcgtacgcttcataccaggcggtttttcctttttgttttgccgcctggtggtcagtatgatctttccaccttttaatcgcctccaggctgtcccagtaggaaaccgtgatgccgcagccgttttcctcccgaacgctttccgcgcctaaaaagcccggctgtccgcctgccaaattcatcatgcgctctgccgtatgttcatattcctcatcatattttccctttattgatgaaaaaatgaccgcataatagggcggtttgggcgtgtcagctaaaaaacccatattcaaccccctctacatatatttcacaaacagaatccggtcttctcccggaccgtcataattcgcaaaaacagggattccgtttacggttttggttcctttttcagcttcaaatcctaattttgtatgataagcgattgatactttattgacaggcgccgtcacgcaattgacttttgtgcaaccccttttcttcaccgtctccataaatcggtcgtagagctgttttccaatttgcatttttctgaaatccggatgcacaccggaaaaatgaatgtaggctgtctcagggtctgattgtgactgaaaaccgattaaaaaaccggtcattccctccggcccgtacgtgataaagcttgtgtcctgaaaatgttcaaaaaacaagcgcggcagtttgtctttcatctgcctgccgccccaccattcattcaaaacagacgtaaccatttcatagtcttcagaggtaattgttcgaatatccattatcgattgactctccttttcgtccggcaaaatgaatgtcagctcttctcattggaatataaaaaattatatgtgggttgtttgcaattgtaaatgatttcttttcaagcaaacgaatcagcacgtcttccagccggggaatgatttaccagtataaacgtgatcattgttcgggtacaatgaaaaacagaacaaatgttcccggaggtttttttatggctgatattcttcttgtagatatgcaatcgttttatgcgtctgtggaaaaagcggaagcgcctcatctcaaaagccggcccgtgattgtctcgggagatcccgaaagacgcagcggcgtcgtgcttgcggcttgtccgctcgccaaacgatacggcgtaaaaaatgccgaacggctgtgggaagcgcaggccaaatgtcccgatgccgttattgtccgtccgcggatgcagcggtatattgatgtatccgtcatgattaccgaactgtttgaacggtataccgatcttgtagaaccctactccatcgatgagcagtttctcgacgtgaccggaagcaggcggctgttcggtgatccttttacaattgccaaaagcattcagcaagcgattatgcgtgaattcggcatttatgcccgtgtcggcatcgggccgaataagacgctcgcgaaaatggcttgcgaccattttgccaaaaaaaacgcatccggcatccacagattggatatgtcaaatatcaggcaggatctgtggccgctgccggtcggaaaattattcggcatcggaaaacggatggagcatcatttaagacggatgggcatcagcacaatcggcgggcttgccggacaccccgccgaattgctgaaaaaacgctggggcattaacggcgaattgcttcagcggacagcccgcggcatcgatccctctccggtcaccgtcaacacgcacagccggcaaaaagcgatcggccataacatgaccctcccgagagactacagccgctttgaggatatcaaagtcgtgctgctggagttaagcgaagaagtggcccgccgcgcccgtttcaaacaatacatcggccatacggtttcggtcagcatcagaggcgctgattttgaattcccttcaggttttcacagacagagaaagctggtgtctccgactaatttcggaatggatatttttaaagcggcggtcaagctcttcaaagagcattggaacggtgagcccgtccgcagtgccggcgtctccctttcccagctggagccttgtgattatgttcagctgagcctgttcgatgcccaggaaaaaaagatcagtctcggcaaagtattggatgatattcatgagcggtacggccctgcgtcgctcctccatgccgcttcactgacagaggccggccaagcctttcaccgggctgaaaaaatcggcgggcattacaaataatttgaggtgatatacatgaatccgaacaaattaacacccgggtataatgtcatgtgggaatcaagccggatgatgctgcccgaacatcgggaacagctgcttgcgaaaaaacaaaaagaacgggaattccggcctccggaactgagcgaagagcaactgaacgacatgaaccgcatcattgcggcgtcgattgaagaagacagggccatctcggtcacctacgcttcagcacacggcccccgccggttttggggctgggtaaaacaagtgaggcatgacgaaaagcgtttaaaaatcataaacgatgaagatgcgttaacgctgccgtttcatcgtattctctcggctgaactggaataaaagcctaaatcgtccgacagaaaatatgatagaagagtgggaggatcacatgatatttagtagaataaagatgaatgacaagaataggagaatatatgatggatcaatttatagaaaaaatgctgggacaagccctccgccagtatggacggaatgtgtcgacagatccgctgagcccctatgaaaaacagagtttaaaaaaagctttagaagaaagaaggaatgaagaacccgatgaggatctccatgcccatgtagaagatattatctacgattacgtcaccaatcaggggcagttttcctgacacgacgtttatgcaccgggcgataagggaaatgtccgagagtaaacccttaaagattgcgtggtgcaggatatgcctgtcgggccttatttcaggatcggctatgccgttcttctgttatttctcatcatttatctcggaacattaatagactttttgttccagcctgttgtgattacggttaaaaccttatttccgcccattgtattatcgggcgtcctttattatttgtgccgcccgctcgtcagactgctgcatgcgaaattaaagttgcccgaaggaatcgcgattttagcgatttatgcgggaacagccggcctttttgtcctcttcctttatacggcgggccctgccgttcaaaaacagtttacagccttcacagatcatattccggagctttccgcaaaagctgaaaattggatcgggcatctccaggacagcaaatggttttcccggcttcagcatggggattcctttaaaaaattagcagacaaagccgcaaattattccggttcaatcgctgattctctcagcagcctggccggtacggctgccaatgccgccatcaccgcagccattattccgtttgcgctgtattacatgttaaaagaaggaaacaaagccccccggcgactgctgcggcttcttccggaaaaacatcaaaaagaaggaaaacaaatccttcgggacatggatgaagctctcagttcatacatacaaggacagctgctcgtcagtttctgtgtcggcgttctcgtcacaatcggctattttataatcgggctcgattatccgctcgttctgggcgcgttcgccatggtgacaaacctgattccgtttatcgggccttggatcggcacatttcccggagtcattgtcggattgttcgattcaccgaccgaggcggtgctggtgattacggtcgtcgtcattgtccagcagcttgaaagccagctgatttccccgcaaattatgggacggaagctggacattcacccgctgaccattatttttcttctgcttgccgccggcaaattctcaggaattgccgggatgcttctggccattccgggatatgcggccgcaaaagtggtcataagccacatgcagaaactattcattctcagaaaaaaaacaaagctaggagagaaatgattcatcccccatgtcttcacatcggtcaaaatgaaaaaacggcgggctgaagaagcccgccgcacacggaggtaaaaaagatgaacatcggtgatgtcatttttcaattgatttcatttattgcagccgcatttttcctgtttgccgtgatatacgtattcaaaagcttgaacaagcgccgcatacaattagacagaatcgaaaagaaactcgacgcgctgcgcgaagaaaaaaacgaaaagttatagttcattcagaagcaggcgcaacgagctccacttttatccgatccgggtcctccgtgtatacggcgtaatgcgtgcttccgcctgcatatggatggcggtccctgtaaagcacggggcatcctctggcaagcagcttttctgtcatctcgtcaacctgctctcttgatgcagcatgaaaagccagatggttcagcccgacccggcatctgtggtactccggtgttaaaaaacgctcctctgtctgtacaagcacaacataaaatcctgcgtttttccagctgatgccggagtcccaattttgaaattccctataaccgagctcacctaaaaaccatccccaaaaccgggcggaggctttcaagtcagatacatacaactcaatatgatgcatcataatattcgcttcctcctcacatcacacccgccttaccagcacctcttcaactttatggccatcaccttttctcaaaatcaaatccgatctgaattttgtcggcaggatattttcatacagattcggacggttgacgctctcccaaatggaggcggccatggtatccgcttctgcatcagacaaatccttaaatttatgaaaataagaagccggatcctgaaaagcggtttctcttaagaggcggaaacgctccaaataccacgtgaaaatccggctttcttcggcatccacatagatcgaaaaatcaaagaaatccgatacaaaaatccgcggatcttccctgtcgtcctctaaggtcggcgactgcaggacattgattccttcgataataacgatatccgcaccttcgacaacctcgacggcgccctcttccctgtcatacgtaagatgggaatatacgggcgcctccactctctctttccctgactttatatcgttcagaaattcaagcagcgctttcacgtcgtagctttccgggaatccctttctggacagaaggtttttcctttttaattccgccgtcggatacaagaaaccgtcggttgtcaccaggctcaccttcggcctgtcaggcagacgggaaagaagcttttgcaaaattctcgccgtcgtgcttttgccgacggcgacgctgcccgcgattccgatgataaacgggattttcgctgaatgcggatgcttcagaaacacattgacatgctgattccgtcttgcggcagacgtgacatgaagatggagcaggcgcacaagcggaatgtaaatcgtttccacttcttccaccgacaggtagtcattcagcccctctacggccttggcttcttcctctgaaacggcaatggaaagatggccgccgaatccggcccacgactcgcggctgtgctgcgtatacaatgtatgtaagttcaattctttacttttcacaattcacaccaatctctctgtatggctttccgataaaaaaacaaacgcttacaaagattgtaacggaaaaccgcttcactgtctgcccatttttttcaaaaatgaggaaccgatccggctgtactcttccatttcctcctccggaaccatgcttccgccggtgctccacacaaggtgcacggcattttccatctcaagcccccgctcttttatataacggtttccggcttcggtctgaacgaccttgacggccccggccagtccggcgagtgcagagggttcaaggctcttattctcggccgcccttaattgataaagcagcgaaaaaagcgtgccgtcatcggcggtataacagccgctgagtataggttccatcagagggccggccagtccggacggccttcccaccgcgagtccgtcggcggccgtttgattatcaagaccgatatcctgcacgctgattccgtcatgcaagccggaaaacagtcctaacagcatacacggtgaatgcgtcggctcaccgaaaaaaatatggacatgctcgccatagatcagctttagcgcaagcgcgacgccgcccgggcctcctccgaccccgcatggcaaataaacgaaaagcggttcatctgcatcaggctttatgttcatttgatcgagctgctttttcacacggcttcccgcaacggcataccccaaaaacagatcccgggaatgctcgtcatcaataaaataacaataagggtcctgcttcgcctgcatgcgcccctctttgacagccagactgtagtctgcttcatattcgatgacgcgaacccccttttcccggagcagctcctttttccactgctttgcgtcactggacatatgaacggtcacacaaaagccgagcttcgcgccgattatgccgatactcagacctaaattgcccgtagagccgacggctatagagtattttgagaaaaaagcggtaaaccgttcttcagtcaatatgctgtaatcgtcgtctgctgagagcattcccgcttttaccgcgagatcttcggcatgcttcagcacttcgtaaatcccgccgcgcgctttaatggaaccggaaatcggaagttcgtcgtcgcatttcaaaagcagacgcccggggaaagcctgagcggcgctgtgttccagacgctttttcatttcattaaccaagacaagcggagattcaatgaggcctccctccgcttccgtctccggaaaagccgacgcgatataaggcgcaaaccggcgcagcctttctcccgcttcggcaatctcctttttccattcagcgccatgctttactggatcatcggttttatgcggattgatccaaaatacttcacgcgcctccgccatttgcctgactagaggctctgccatcaatgccttgtgtatatcccggtcggacattcctttttcccccttgttactttttctttaatgcgcggccggccagtttttctgtaaacgatgggaaaagctgatacagcttcgtcccgaggctcatccatcgcggaagattcatttcccgtttatccgtcagaatcacggatgtaatgcgctctgccacatggtcggcatcaagcatccatctgccgacgcttttcacataaccgccctctttatctgcaattgtaaagaagtctgttttgatcggaccgggattaaccgttgtcacggctacacccgtaccggccagctcaagccgcagcgcattggaataccctaacacggcgtgcttcgttgcagaataaaggcttgatttcggcgtcgccaatttgccggcctgtgaagcgatattgataatatggccgcttttcgcatgaagcatcacaggaagacaggccttcgtacaggcgattaatccgaagacgttgacttcaaacattgccttcatatcatccaaagatgaatcagcggccgtttcaaaaatgccgaagccggcgttgttgattaatacgtcaacatgaccgatcaaacgccttacgttttcagcctcttctgcataccggacgtcaaacggaacgacatcacactgtccgccgcgcgcggtaatcgtctttttcacttcctgcaagcggtcctcccgcctggcggataaaaaaacatgagccccttctgccgcgcaagaatatgcaagccgttctccgagtccgccggatgctccggtgatccaaatccgcttatccgttaatctgctcatttccttcaccccttcacagctttaaacttcagagtgttccccgactgaaaggatacagccttcccttcggcggccagcacgtcaagatggccgatcgtttctgacatcgttaaaaacaattcattttcatacacagccggaaacagccgacggcatacctggaaagccgtcagtgtttcctctgacaacaggcgcagcacatattccgaccgatttctctgtttttcaagccgcctgtcaaaagcaggctttacgtctgtcagcagatcgccgtgtcccggatataaaaaggacgggtttacgtcatacagccgcttcattgagttcaagtagtcgagcatcggggccgcgcgcacgccccccttttccggagcttccagaatcggattggtggagctgttggacaaaagcagatcgccgctgaacatttcaccgcttttttcatggtagagcgcaatgtgagaagcggcatgacccgggatttcgagcaccgtccagccgttaagcccgtcaatttttccgccttccctcactgttttcgttaacggacggtttgcagaaaataagtatgacagcttaactgttttatgtatgtcttcaggcgtcagaggaacgcccatttcagtcataagcgacagaaaaaagtcctcctgccgggcgatatacgactggtcctgagtaatgtacctgtcattcagcgagtgccctattacttccgcatcatcggaaaaaaggtgcagcagacctgaatgatctgcgtgatgatgagtgagcaccacctgttctatatccgccgcagaaaccccgtgttccttaagctgaaatgagagcgattcagccgcttcctttgtattcgggccgcaatcaataagggttagggcttcatcttttactaaataaacgataacgtcgccgactgcaaacggagtcggcacacgtatcggaatgatctttctcgctgccatgtttacgctccttcgttcttttcattcctgaataatcatattttagcgttttcttttcactgtgtcattattgccgcatatcggaaaaaaagattgacatcccgctcttgcgcatagcataatgaacaacaaactagaaaacacggaacgcgatgacgaggaactagtatataaacaacggcagcagagagcaatgtccccggctgaaagacattgcggccctcttgtttacagaacctgccctcagagcggttaggaaaacctaaacgtatcccctcgttacgggatttgagctgagcacggctgattcgtgctaatgtaaggtggtaccgcgaaaccttttcgtcctttttgacgggaaggtttttttgtgttttgagaagaaggaggatttatatgaagaaaatcggttttatcggggccggatcaatggcggaagcaatggtgaacggactgctgcaaagcgggatgacagcccccggacatatatatatgacaaaccggtcaaatgacagccggcttgaagagctccaaaaaacgtacggagtgaaaccgtgccgggataaagaagagtttttcagcaataccgacattatcgttctcgcctttaaaccgaaagatgcggcagaaagcattgagaacattcgcgaatacgtgaaagatcagcttgtgatttctgtcatcgcagggctgacgattcacacgattcagcaatatttcggcagaaagctcaccatcatccgggcgatgccgaatacatccgcggccattcagcaatcggcgaccggtttttccgcaagctccgaggcgagtgaagctgaaatccggacggcaaaagagcttctggaaacaatcggagaagcgacgcgctttgaagaaaaacaccttgatgccgtcacagccattgccggaagcggtcccgcctatgtgtaccggtatgtcgaagcaatggaaaaggccgcccttcaagccggcctgccggaagaaacggcaaaagagctgattttacaaaccatggccggggcgacggaaatgcttagaacaagcagcaaacggcctgaacgcctgcgcaaggaaatcacaagcccgggcggcacgactgaagcaggccttcgcgcattagaagagcgccgctttgaagaagccatcatgcactgcatcgcagaaaccgcagcccggagcgccgaaattaaagaacaattcgcaggctccgttctgcaaaagacggaccagtgataaagcatggggcttcccatgcttttttcattctgtttaactgccgtataagcggctgattctctcttttacttcaggaagatggaatgtggcttcgtgcatgttcacctcttcctcaaccgcttttgtcagctctcgtttgatccgtgcggtcacattggttttcagcgcaaccagtgaggctcttggtttatccgccagcagccgggccaattcgcggcctctttgaaggacatcttttttcggcagcacttcaaacggaactccccgtttttccagagcggcgccgctgaaattcgcggcagtaaacagcatttcttccccgaggacaattcccagtttttcaggcacaatatacgtcgcgcccattcccggtgtaaatccgtacttcatataattacaagaataaaaactctctctgcttaaaatcacaaaatccgagctcagaccgatcgtaaagccggctccgatcgcatgcccctgcatggcggaaatcacagggatcctgcaatccaataaaagactgtgaagctttaaatctgtaaattggagctttccgctctgaatggtcaaaagcccctcctgcgttcctcccgtgcagaaataatttccgtaacccgtcagaaggacggttttataggacggatgggcattgatgtcttggaatacccggtgcagctctctgacaaactcttctgacagcccgtttttcccggccgtatcctgcattgtgacctgcacaatgcccggttctgtttcctgtacatcaatcattggattcatgtttattctccgtttctttaaaaatactcaagcctttccggctctgagtgtttctgacactaggtcgtccattcatactttctgtgaaactcttttatttcagtcagcaccaatcgcgtttttccttgatgcgcattcgggatgtctgctgcgggcgcggcatttcttgtgccgaattttacgataccgctgtcttggagcagccggtcgtaatcagccatcgataaacggacgcgttcatccaaatgccggctgatctgaaattgattctgccgcgtacggctttgcggcataacgacaccgctgtaaaattcagagcagcagcccgaaccgtatgaaaaacagccgacgcgtttcggcgtttcaaaagagccgttatcaatcgtgctggcaagagataaaaatacggtggcccccatgatgttgccgacgcgctgacagtattgaatcccaggcagcacgcgttgctgaaaatccgcttcaatgtcttgcggcttagcctttgccaattttctcatcatcgtccgatgcgctccttttaccattccgccaaacggagtatgaaaagaaaggtattgaaatgtattcttataatccgccccgcttacacgctttctgtattcctgaaatgatttttcacagcagtccaaataagacatgagcgacagatcagcatcccccgcttcactatccgggatcgggcggcacgtatccatgacttcatacccgtaatacccgcttgcgccttgatcaagcaaaaagacatgaggggtgctgctgactaaaagcgccacagctcccgcccccgcactcggttcggcataggaccattcctccgtcaacgcgtcaccgccttcagccactaaaaagcgggaaatatccgttccgatgatgagcgctttcgctcccggcgatgtttgcgataagatgaaattcacgcccatttgaaatccggccgttaaagaatagcaagcctgtttcacctcaaataaccggcaattccgcttcagctgcaaataatcatggacgtatgtactgatggatttgccaaaatcaatcccggattccgtacaggtgatgaccatttcaatctgattccgttcctcttctgacagagagtcgataattggttttgcggcatttacggcgaacgtaatcggatcttcaaacggaagcgccaccactttttctttcatcagcaggttctcaaacctttttttatccaggttccgatgttccgcaagctccatgacgtctacatacgctgttccgccaaacacgttcattgcttcgattcctacattcatttctccaagcccccagagtaaagaggcttcctgtggaagcctcttttattttttcgctcaaaactcaacaagcagcctgtcaacgccgtgaaatacagggctcggaaccagattcggctcttgatcctcagtaaaacgccatgcgggcacctgttcaaaaaagtgggaaagcgcgattttcgcttcaagccgggccagcggcgctcctaaacaataatggctgccctgaccgaatgacagatgctgattcggctttcgtcccaagtcaatttgatcggcattttcaaacttcttttcatctctgttcgccgatccaatccacgcatacactttttctccggccggaatcgtttttccgccaatctcgctctcaaccgcggtgtagcgggttacccgctgaatggaaggtctgaggcggatgacttcctcaataaagtcaggaaggagcgccttgttttcaagcagccggggcagaatgtgcgggaactccttgagactgagaaatgaatttccgatcacattttccgtcgttacgtgccccgcgacgatcaacaagccgcaaaaaccgattaattgcttgtctgacagcggctctccgtctaaatcagctgaaattaaatggctgattaaatcattttgcggctgttttctccgctgtaaaataaactgcatgaagtatccgatcatctgcttttgcacttcattcattttcttttcatcttttacattctggctttggtcgacccagcctttaaagatatctctgtctttcggaggaaatcctaaaagctctgcgatcacgataatcggaagcggaaatgcgtaatcttcaataatgtccatcctgtcttttgaacggacggcctgaagcaggtcatcagcgatagcggctatacgcggtgcaagagtctcaaccgatttcggcatgaacggctgattgaccaattttctgaagacggtgtgttcaggcgggtccattttcaaaaggctgtctttgttaatatgccgaatcattttttcctgtttgtccgcacttaagtatttatgatcggaagaaaaatgactgtagtcagaaatcacccgcttcacttcatcataggtgaagatttcccagcaatcttccttttcattgtaatgaacgggagaggtttctctcatcgtttggtaccacttgtacggctgctgctgtctgatttttgttaaactggtcattttcattcctccaagatgtgatcaagatttgaaatgacccgccgaagcttacgagtaacccggcgggcggatatgtgaaattacggtcttgttttggcgggctgcttcagcatctcaccatgcacattcagtatcttttcctgcagctgcagaaagctgtattctgtcattccgtctgccgaatataaaacgccgcaaaattcagaaatcgtttcggctgtgctgtcttctgccaataacgtcatatggttggataccgccacatccatgatggcgatgtttgtcatatgctcttcccactggctccaatagttgacgaaatcagcggataaaatatcagccctgatcgtaaaatacggatcaagctcacccaagaaaataccgtttttatttcggaaataatagcatgtcaccccgttcggatccggaagcggcaggagttcgtaatcagtgatttcgtaagcgtcctgaacgtttatattctgcctgatcagatttttcaccaacgcgtccgtcttcgttaacccccgctgtttggcttttgcgattaattgctctaaaaatatgtcttcatgaagatcggcattcagttcatcacgatgaatcaaggtttcagaaatgcgttccggatgttgatagattggtgcaaataaagccatgttcaccgtctgcagcatcatatttttatcaaataattcatcaggaatgtttatttcccgcgcacccgctgagtcaaaggagtcgagcatgacgattgactcaacggtttctccagccagctgcaattgccgggtgacttcataagcgagcatgccccctaatgaatagccgcctacatcgtaaggaccccggggctgcacggtacgtatgagcttaacgtaatattcggccatgtttttaatgccgcggatcggttcccggtctgtcatccaccctcttgcctgaattccgtaaaaaggacgcccggtccgttcggcaacaggctggtacagctccactgcccccagcgcggaatgaaaccagaaaatcggtcttccctttccacccgggttaagacagatcagctcgggcggttcttgatcatctgtctcttctgatatatcgttttgtttcgtatgttccccatgtacttcctcggtgtctttttggacagaaccggtcagatacccggctaatgttgcgattgtcggatattcatagaccagatttgccgtaatagacgcttgataggttttattaatggactgaacccattccacaccgataatagaatccagccccatctcaatgaatgcctcatgctcatcaatatcttccggcttcagaaacaggatgtccgcaaggctttctttgagctctttgcgcaaagtgccgtcagagatgccggcaaggggagtttctgcttccgggatttgcggacgtaccgctgtttcctccgcttcagcatactcgggtttctttatttgtcccgctatatattccgcaagctcttcaagcgtcgggtgttcatacaccttattggcagtaatctcagtgtggtacgttttatttactgtttgtatccattcaaccccgataatggagtcaagacccatgtcgatgaaaggctcatcagcatcaatatcttccggtgacaaaaataaaatatctgccaggcttatcctcaattcttcaagcaatgttctattgtcttcggaaacggctttttctggctgctggacagaaacagtacaatccaaaggctgtaacacgattggcttttgcaatgtctccggttcaaacgctgtcatttcgatctcagttaaaggactcagagaaatcagcccttcatgttcaggctgtggcgaagacgggagaacggtttgcgtttcagactttttcatggtctgtcctggtaaagaactgtttacatcagccgcccaatacctttcttttaaaaacgggtaggcaggcagcggcgttttataatattgtcctccgtcaaaaagccgtgtaaaaggaagatcataccctctgcaaaaaaggtcagcgatatgtgccaggttttctctgtactgtgcgggcgaagccgccgagcggcactgttcaatgcattccattccgaatgttttcattccggcttcttctgccggcttctgatccttcaaattggacacaaacacacccggaagctctctttttacaagccactccgataatacccgcttcagttcgtccgcactgctgacgatacaggcaaaccggtgatgtaaatgctttctgccgagcaggagcgtataacttatatttcccagatcgctgtctttgttcttgctgagtgaatccagcaggcgttctgcctgaatttccagctgacgctccgtccgcgcagataaaggaatgaggcaggctggttttgccggcgaccggcgcacggtttgcggcgcctcttcaatcacaagatgggcatttgttccgctgaatccgaatgaactgatggcggctctgcgcggtgcatccggattccgttcccacggtatcagcttttcattcacaaaaaacgggctgtccgcaaattgaatatgctgattggcttgatgaaaatgcagggaagccggaatctgccgatgcttcagcgacagcaggattttaaacagtccggccatccccgcggccgcagcggcatgtccgagattggttttcacagagccgatggcgcaatatccttttttatccgtatagcggcggaaagcgcgcgttaaggcgccgaattcgatcgggtcgcccagtgcagtgcccgttccgtgagcttccaccatttgaatggtttccggatcaatgtgaaaagtatcatagacatgacgttccaatcgttcttgagaaagcgcgcttggagcggtgattccgtttgtagcgccgtcctgattcattgcagatccttttatgacgccgtacacatgatctccgtcactaacggcgtcgctaagacgtttcagcaccaccgctcccacgccttcaccaggcacgaacccgtccgcgctttgatcaaacgtatggcagcgtccggtcggtgacagcatattcgccttatttgacgactgataaaaagcgggagtggattgaatgaaaaccccgcccgccaccgccatttccgtttctttcgtccagagcccctgacatgccaaatgaatggctgtcagcgaactggaacatgccgtatcaacagtgatcgccggcccttgtaaattaaggtgataggcgatccttgccggagtgacggaattatgattgccccaaaacgcctgcgcgggcccctgctgtttaaaaatggcctggtaatctccgccgcaggagccggcatacacgccgcattcccggcctcttaccgagtctcccgcatatcccgcatcttcaagcgctttccatgattcttccaaaaacagcctctgctgagggtccatataggtcgcttcacgtcccgatatatgaaagaaaacggggtcaaaacattcaatgtcctctataaaactgccatactggcattggctgtaagagatatcccatctgtctgcttttttaatcagatcccgtccggcggctaagtgttcccaaaactcatggagattctccgattcagcaaaccgcccgctcatcccgataatcgcgatcggttctttttcaggtaacacagctgctgattttactgtatcggccggatccttttgttcggggcggtacgtcatttgatacggttcagaaacgctgatgacgattttcccgatatttccgcggtcatccagacagtgatacgcttcttttatgtcttcaaaggaaaagatttttgagatgacaggctgaatgactccctcttccgccagccgctgcagttccaattgatagtccttgacctgatccggattttgaagggacagcttccgcaaatccacgctgtgaaacgattgattgttatgaaggacggacaagtcgactgatttagcggatttcagcgcagtcatggcaatttcgatatatcttccgcccggcgccaggcaattcattcctttttgcaaggcatcaccggccagggtattaatgacaacatccaccccccggccgccggtcattcgcatgatttccgtttcaaaatcttcttctaaatagcaaatggtattgcggaccccgagcgaatgcaaatactcaatttttctctgtgatccggccgtggcatatatttccgcgccgatatgccgggccatttgcaccgcgatcagccccgttcctcccgtcgcggtctgaattaatattttttcgccttttttaagtccggctttccggaaggcgtctatcattgtcaccgccacggtgggaagagcgcatgcttcttcaaaggtcagccgggccggtttatgatagacttgatgttctttacatgtgatgagattcgcctgagatccaaattcctctcccatgccgacaatcacttcatcacctggaatgacggatgttacatgcctccctgtcttgatcacgacgccgcttgcttcaaatcccggtgtgaacggataaggcggcatcgtcgggtacagccctctgacacaaagcaagtctccgaagtttaaagaaaaggcgcggacggctatttgaacctcgtcatcttttgtctcgggcacttcactgcgggcaatcgtcagatcttcaatgccgcccggacggtcaatcacaacccggaacattcccgagtcatcggactttgcgaaagaaggcggcatacgttcttgtttcggtttctgataaccgttttcctttctttccgtctgcagaggtttttcagcaggccgttcttcctgaagcgccgggcggattttcgctctttcggccttcagagacgaggctatgatggtttcgtattcttccgagatataacgggtcagcagtttcacatgatagtaatcaaataaaatcgttgtctgcagtgtaagattcaatcgcttattaatctcgttaatcacattgacggccagaatggaatcaatgccgtattcagagaaattcagttcttcctgaatatcctcttctttcatttttaatacatcggcaatacttgttttgatgactgagcggacatgggaagcgaccgattccccatcagccttaacagcttgatgctcctctggcgtgcggctgcgggaaacaggctgcgcgggctttcggaaaacttcggccggggcggcgtatggctttctgccgtctctgatcccttgcatccggacgagtccgtcactctcagctgcgataatctgctggcctaaatcatgagccgtttcagcagggaagcagaccgctctgtatccttccgaatgcagcacacgctcccacgattttggatataagccgggacttcccggaatccgaagctcagcatcctcataggaccaccagccgtcaagcagcccgaaggttaaatgggtaaaaacagaacgatcgctgatttcgtttatcaaaatcatcccgttgtatttcaggagcgctttcagacggcgcagtgtcaaaccgatatttcttgtggcgtgaagcacattggcggcgatgacaatatcgtaaacacccgttttgatattttgtgattcgcaaggctcctccgcattaaacaaggctgttgtcaaatacggcacatcaggtccgtattcctgttcggcatgcattaaaaaagctttagaaacgtccgtataacaatattccgcaatctgttttgcaaatggtttcagttttgtaaacagcatggcgctcgttccgcccgtcccggcccctacttctatcagcctgatacgggcatcggggtgttctgtaagataggctttcaggtaagcggccgcggaatctgctaacacttcattaaaataatccgcgacaggattatgcttataaacaccttcaacgagccgcattgatgaatcgggaaatacgatatccgtagccggacgttctccttttaaaatggaaggcatcgcttttatcgtcgcctcggccaattcagcttgcgcaagctccccattgggaagcaggcgtttatgggcattccactcattccagactgtgcggccgtccgggcgctgatccgtgagaagagtgatcgtgtatccgtcatacgcgatatatccgttttcttttaatagattcaagctttcttccagccatctgccgtatgtgccgatcacgccggcgctccgcatggatgctgcaggtgtggtgacaggctcgctgaaaaacccgattgactgtaattggtaaaagagcagtttgcaaagaaggctgttcatatgcgcaactccatttctcgttttaaagtctcaagccggtcattccgatccggattttgccgcttgacgctttccataaatgaaggcttcgggccggatacaaccgatattgcatcttgatccgtcagcgcggctaagccgtgcggagcagctttgatgaataccgcttggctgaacggttctgatagtaagacttccagcgcctccattgcttcatcgggttcaatagaaccgatccctgacgcctccatccgttttctgtaagacgggtctgatacaacacccagactgccccaatatccccaattcatgactttcacttcacaatcaagcaaggaagcgatatggcgggcaaaggcgtcttgaaatgtacaccctgccgcatagttgctttgcccggcattttttgtgaaagaattaacggatgagaaaaacagcacaaaatcaagcggttctcccttaaaagcttcgatcattcggacgctcgtattcaccttagctgaataagcgtttctgaaagaagcttcatccatattcgccatacttttgtcggcaagcgttatcgcggaatggatgactcccgttatattgccgtattgctctcttacggaacggacggccgctttaagcgctgcggcatcttgagcatcagcctgtatataatgcggcgcggggcctgatagcgccagcctgtctattttgctctgaatctcctgatccttaggccgcctgccgatccatatcatccgtgccttgtaacgggtgatcatgtatttgctccatgcttctccgatgccgcccgctccgccgatgacagcataaacgccgccttctctgtacgacatacgcggagcggaacttgtcagcacccggactgttttttgcttgtgccaagctccgttacggtacgcggcagcatttccgtccggatctggaggaaggcgccagatgtttttcatctcagacgaatcactgccttcttccgcatcaatcagcctgatgtcccagttcggatattcttttgccaatgaaccgatcaaaccgtgtacgcctgcatgctcaggctgcggcagatcacccggatacacggactgtgtctgccgggtcaccgccgtaaagctgatgtttcggtttccatacccgagtgacagcagcgctttgatgaaacggaaacattgaatcaccccattctcctgctcatcaagcatttcctgactgacggatgcgggtgcgaaacgatccggcgcaatccataagaaatggcggatatcctgatacccggctgtcaattcacgtaatgtttgctcgcttgaatgatccggcgtctccgccagatgggcgcggggccacatttttgccgcagcctttattgtatttcccggctttccgatgatcagcatttgttcttgatcaaccgctcgattttcttccagagaaaagaaagttttatcccaaataggggcaagcatcgccgtctgaacttcctgccgtttgctttcggtttggtttgtctgccggacagcccggcaggagaagcctgttaacctcatacaaacagcgccgttttcatcacataaatcaatatccagcgtcagcgctccattatctgaccgatcgctctgtttgcggacaagcgcccacatcgttttctgagtcggctgaaatatttctgcctgccgcagggaaaacggcagcatcggagtgtctccggcagtatctgaaccggcacccagtgacgcctgaaacgcggcatctaaaagactcggatggatgacaaactgatcggcggtactgtctgccgtttccggcagcgacagccgggctgcagcacccctctctccgatcatcagctgatcaattccttgatggctcggcccgtatatcatacccgcatgccggaaagcctgataaacctcatcagacgtcataaccgattggctgcagccggacagccagccctctaagtgaactgacggaaccgctgctatctctcctgataccgcggtgcctttactgtatataatccgttctcccccgggttcttccgataggctgtaaatcgtaaattcaatgtcttcatttcccttaaggataaggctgatatggacttctacatccgtccccttatgaacgacaggcctcatccatatgagatctttcaaatacagtcctatacgtccgtccgccacagcgtatgcggcacgctcaacggccgccctggccatttcgatcacagcggctcccgggagcaccttctccccattgactgtgtggtcagtgaaaaagaattcccgtccggtaaaaacagaggtgaatttcagctcccacagatcggatgtgttttcatgaagcagcggatggatcaccgttttgccgtcattccgttttgaaaccgcctcggcttcatcttgaatccagcatctgacctttgcaaacggataggcgggaaggctgattctccggggtttttgtcccgaatataacaagttccagtccacatcgactccctgcacccacatgttcagcaaatgaccgtactttctctttttcagccatttgaccatggcttcctgcaaatcttcatcagattcaaacacagccactgtctcatgatttcgcttcgcccgccccctgtaaagatgcggtgcgttttcattttccaagtacgatctgagcttgtcctccagctccttaagagagtccgcaatgagagccagccgctcatccatcgcttcccgccccgcttgtaaagtgtatgcgacatcaaataagtccggcttatccgtatgcttcttttgaagaaaagcaaggaggcgctccgcatattctgtcagacgctccccatttttcgcagacagcagaatgacagccggctcttggctgctgattgcttgtttgacaggagcctcatattcttcaataatgatatgcgcgttagaaccgcccgcaccaaagctgctgatccccgccctgagcggctgttctgctccgtctgctgaaatccgtttccaatctgttaattcccggcagacggaaaacggcccttcatcaaattggatattcggatttaaaacatccgcatgcaaagatggggcgatttgtttgtgcttcatctgcagcagcacttttgtgacagcggcgatgcccgctgcagattccccatgtccgatatttgatttgacagacccgatgagacatgtttcaggaacatcaccgaatgcatcggttaaagcccggatttcaatcggatcgcctaatttcgtccctgtcccgtgcgcttccacatagctgatctggcccggagatacccccgcctcctgtaaagcttgagaaatgacttcgctttgcgccttggggttcggtacggtgtaaccgctcgctcttccgccgtgattaatggcagctcccttaatgacgccgtaaatacgatctccgtcttgtacggcgtcttctaaacgtttaagaagcagcaccccgaccccttctgccggaatatagccgtcacccccggcgccgaaactcccgcagtgtcctttagatgagatgaactgcccctggctcagcatgaagtacttgttaggatgaacggtgagattcactccgccggcaagcgccgcgcgaatccgatgatcccgcagatcccggcacgccatgtacaatgaagtcagcgaacccgaacacatcgtatcgaccgaaatgctcggcccttgaaaatcacaaaaataggagacacggttagcaatggatgaaatcccgccggggagcccgatatgccgtcctttcactcccgcttcagccgcgaatagcgggtattcctgatacatgacaccggcatacacacctacctgacggccaagttcaggtgatgtcctcgtatatcccgcatcctccatggccatccacgcatgcattaaaaacagccgttcctgaggatcaaggtgttccgcttcacggggggaaatcttaaagaactcaggatcaaaatcggcgatcccgtcaatgaatccgccccatttgctgtagatcgctcccggcgccgtccggtcctcggaaaagtaatgttcccatttccagcggtctttcggaatttcggtaatacaatcctttccttgtttgagattttcccaaaacgcattgatatcatcggcctgcggatacttgccggaaatcccgacaatggcaatatccagcggttttcctttcgttttcggacggttttgattcccggacggggcaaaagacgcattttcaagccgatttggctgaagcacttctttcacagacgcgtttttcaattccgccagctgttccccggtatgactgaggactgcggcatcaaatgagagaaacccgtcttttttatgtttgattgtattcaccacataggcggtatcagacatgactggtccgtaaagcgtcagcctctcaatcatgagcgggacgtgaatccgctttttcagctgcaattcttcttcaccgagcgacatataacaagaattcaatataagcgggtcaaatgcaaagtgacgcagatcgcctttttctttttttcctgataagtccagctgcaataaaaaggagctctcactcattttgtatcccgccgttgccgttttcagcatcgggcctatcgtgaagccggcaaccgaatcgtacagacgggaaataacatccggcgctaccttttgtgcatgcgccttcatttgttcaacgtcatacgatttttttacgggtgcctctatacctctgcttatttctccttcggcacacgtcttccggctttctttaccggagacagtgcagcttgcggtaaagcgttcggcactcttttctgccgcaaatgaaatgtcaatctgtgcggcctctcccggctccagcgtgacgggcccgcccgtaaagcggatatctttcagctcggcgggatacgtgccggaatgagacgctccggatgcttcaagcaccagacacggatacactacacccatcagtgccggtttgccgaaaaccagatgatccttaaggaatgcttcatgttcatagaaagtaaatgtctgactgactgattgcgtttcagagaccggtgctgcatccgcgacaaggccggaagattcacctgttccttttgtttttatgtcttcaagcagttcggatatgctgctgcactcaaataaaagagtcggattcagccgcagatcaaacgccccttcgatgtctttaataatggccagaagctgtgacgattcaaggcctaattcaaaaaatacggtgtgcgcatcatttcttgtgacaggacggcctacgtatgttgagaaaatgcggtataaggtttcctccatctgctgaacgcctggtatcagctgccggtctgtccgcacctttttggctgtcaggccgagcagtgaagcaatatgcgcaccgctgaggttgtaaaagtcaatatccattttcaccatttcagaaggcgtgccggattttttcaaaatcaccgcgtaacagcgctccgtaacggtttcagcggcactaaacgaatcataataaatcggtaaaaacaaaccggcgcctgcagctgtctgcaatacgccggaggccatggcggcaccgtccatcagcgcgggatgaaagagagcgccggggagattttcctggcatgaatcagactgccgaatatcaaggaaacattcctcttcatttgcatagatctctccctccggcttcatcagcccgtcatgcaacagtccgcggcttctcgcgccttcgtaaaccgtatgcaaggagactgatggaagcgcaacttgttttttctcttccgcgtcaaggcgcttatctgatgagaaaaccccttcatgcacctccgctgataagaaaaccgtcccggaatccgccccgcaaatcgaggcagtccagaactccttttctttactgaatatgacactcacatcaagccgctctgaccgcttcactgataaaggatgataaatggtcacccgtttcagacagatggaacggaatgaaagatcaaggctttgctttgccagctgatacagcatatcaatataggccagaccgggcatgacagattctccgtgaacaagatggtttttcataatgggatgttctgccgtcaggcgcagattcactgtttttttcatggttagtccccttttaaaaacgtcacgttgtcacctgccaaaacgagtctgcaggtgcagtgcttgtctctgcttttttctcatatttctttaaaagatccgcaatgtctgttttttcattacttgttttttccgcttcattctccgtgctgttccagccgcccaaaagcgggtagtgtttttttctgaattccggcggctgaggcgccaggtgatgttccccctgcctttcacctctgtattcttcaacgaggatatgagcatttgtcccgccgtcaggaaatgaactctgagctgcgacgcggggtttcttctctgaatgccaatcaatgggttcacgattaaaatgaatacgcgacgcttcaaagtcataatgttcaaatggctcacgcgctgataagaaaggcggaatccgcttatgatagacgctcagcacacatcggatgaagcccgcaagacctgaagacagaagcaaatgccccacattcggtttcaccgatccgatccggcagggcagaagcgttttccggttcagctgatagacatctgagagcgccttgatttccaccgaatcaacgattggggaaccgcctccgttcacttctatatatccaatgtcttcgggcgacttttccgccatgtcaagcgcagtttgaacggcgtctctctgcgctcttatattcggtgaaccgggaccgagcgtccggccgtcattgtttaccgagacggcttttatgacgccgtaaatacggtctccgtcccgcaccgcatcgctcaatcgtttgataaaaaccgcccccgctccttctccgagcacttctcccgctgattcacggtcgaatatatgaaacacgccgttctcatttaaaatatggcgcgctccgaataaccggtgcgcggacggagataagagcagactcaccgaaccgactaaggccgcgtcaatccttccggccaaaagggcgtcttttgcaaaggacagcccgatcagccctgaggaacatgctgtatccacgacaaggctcggccctgtgacattcaaaaatcgtgaaatgttggccgctaaatagttttgccccgcccccaaaatcgggttaggcgcctgcaggatatgttccataccggctgaaggctgcgccctgccgccgatgtacacgccgactttccggcccgataaatccttttggccgtacccggcatcataaacggaatgaaccgcttcttctaatatgatccgcgcctgcgggtccataattgccgcgtctttttcagagatgccgaaaaagcccgcatcaaacatgtcgatatcatcaatccaccccgcataatcctttgcatttgctgttgcatgccagcgcgttgcggggacaggccggatggcggtgtttcctttcatcagcagctcccaaaaagcatccgttccgcccgcccccggaaaacggcaggacatgccgacgacggcaatatcgtcttcagtatccgctttcggctccatgaatgttctctcttcagcgtcagcgattaaatcaggctctacgtccctgtcttgaacgaaaccattttcttttgtcacaaaatcggcttcatgatgcgctgcgaaatagtcaaccatttctgtaatcgtttgatattgaagcattaaggacggtgttaactttatgctgatccgtttttgcaatgattgaaccaattccgcaaagagtattgagtcaatcccgtattcatcaaacggcatatcatcttttatctgctcatccgtcattttcagttcttcgctgaaaacggtgcgcacccattgacgaatcatatccttcaccttttggtcaccggcagtgctttttttcacgggagcttcagatttcttcaccttcagaagatcaccaaaatcaggctcactgtcttcgggaacacaaggaattccgcagctttgtccgtttaagatgatgtaatctaaaaacttcagtccgtcttcggcagacagcctggaaagtcctgatttttgataagcaggtgtttccggcaggccttcagccatgccggtttctttccagacgggccattgaacggctttaacaaacacgtttcctttacctgcttgatgatttgcaaaagagtccataaatgaattagccatcgcgtagtcactttgccccgcagcaagcgaagggatcagacccgaaacggatgagaacaaaataaaaaacgacagcggctcattctgaacagcttcatagagaccgcgaagccctgttactttcggtgtgcaaacgctttcgatttcagtttcggttttgttataaaaagcggggtgttctcccattgcgcccgcgcaatgaaaaacgccggtaatcggccccatcgtgccgctgatgctgtccgtcattttccggagccccttttgatccgtaagagaaacgctgtaataacggatctccgcgccccgctcggctaacctctgcatccgctcggctttttccgggagaatgccgtcctttttcatgtctgcccactctgaggaatcgggaagctgctcccgccccatgatgaccagtttcctgcagccgcgtgaaacggcatgctccgccgcaattgcgccgatcccgcgcgatccgcccgttattaacagcacatcatcagacgaataggaaagctcaggcgccgccgaaacattcataccctgcttcagaaacggcacataacggcgattcagcctgtagcagcattcactgacgcttttggcccgcggctgtaaaaattcagtctcaatctgtctgcttaattcttctgtatgctcaatctcacaatcgctatctatcgtaaaagaatgaatgttggcatactcagcgcccagcatccggtacagccccgccgttttcgccccttgcatcagaggtttactttccttgaaaggctggaggcggtgtgtcacttggctgaacacagcgccgctatgacggaatgattccagagcctgctgtaaaaaggcaagctttccgtgttctatctcttcctgccgttcatattcagcgtcatatgcggttatgtcgacgaccccgagtgtctgtttgttttgaagagactcccgcactctgccgtaaaggtttcgccccgatgcggcggcgtaataatcagcgccgtcttttgcctgatggatgaagcagatcgtttcaatatggccgtttcctttaaaaagagcatcggccaatcggctcgtcttatcagttgcaagtatcattactgttcctgataatgcttcagattccgccggatcttgctgcttccagtctttttgaagaatgatcttttggttttccgccggttcgtctgtctgtttccggatatccgcaggcacaggcacccaataccgctccttcgcgaacggatatacaggaaggctgacccgtttcggcttctctccttcgtataacaggctccagttaacggcggctccttttgcccactcagtgagcaatctggaatattgctggtttttcaacagctcggccattccacttgatgaaatatcatcttgagcacgtccccggaaacatccttcaatttctgttttccgttcaagcacatccttcagtttcgcttgcaggccgcaaacggatgtaacgatcaatgccagccgttcaggcatcgcttctctgccagcttgaagcgtgtaggccaggtctttaaggttgacttctttttcccgtaaaaagcggtcataccgtttgacatattctaataggcgatcttcattttttgccgaaagcagaaacagaaccggctcgtcttcccgtatatttaccgatttcttttcagcctgcagcggcagatattcttctatgacaaaatgggcattgctcccgctggcgccaaaagaacttaaacccgctcttctcggctggtcaggatgtgacggccgttcccattcttccagccggtccgccacataaaacggcgtgtccggaaacggaatatggggattcagcgtgtccgcgtgcaatgacggaaagatttctccatgcttcagctgcaaaagcacctttgttaatccggcgatcccggctgctccttctaaatggccgatatttgatttggcagagccgatggcgcaaaaccgcttcttgtttgtccatttgcggaaagcgcggctcagcccttcaatttcaatcggatcacccaaagacgtgcctgttccgtgggcttcaatatagctcagtgtctccggatcaatgccggcactctgaaaagaatctgtaatgacttccgcctgtgatgccggatcaggcacggtcaaaccggatgtttttccgacatggtttaaagcggagccttttatgacgccatatatcggacagcccattctttccgcttcttgaacggttgtcagtaacaccgcgccgacgccttctcccggcacataaccgtcaccgccgtcggcgaagcttttgcagacgccttctgaagacagaaatccggcattcgccaaaaacgcatatttatgcgggtgtgtgaccgcattcacaccgccggcaagggcgaattcgcactcccctcttttaatgctttcacatgccaaatgtatggatgtgagcgaagaagagcacatcgtatcaacagccattgacggtcccgtaaagttcaggcagtgagacacgatattcggaacagaggcaggcgtcacgcccatagacagcggtgtaccccgctgtgtgatttcagccccgaacagctcataatggctccaaaacacacctgcgaataccccgacgcgttttctcttttgcgaagatggcccgcgcgccgttctgtcctgataaaaaccggcatcttcacaagcttcccaagccgtctctaaaaacagccgtgcctgcgggtccatcatttcagcctggcgaggagtcagattgaaaaacagcggatcaaagctgtctatgcgatctaaaaatcctccgtaacggtagaactgatctgcttcatatgagaaaggataacctttccatctgtctttcggcattgttgtgatgcaatctttccctgagcgcagattttggtaaaattcatcaatgcttcccgcctgcgggtatcttcccgccaatccgattaccgcaatatcgtgctcttctgtatgtctctcttgtttttggctccttctctttacagctgcatgggataatgaagagcggttcttgtctgccatcggaaccaatcgggccatgctttcagttacagccggctccttcccgtataaaataacagattgcagcttgccgagacgcagcatatattcaagtgaagccatcccttccccggccggaagcgggctggtgcccgttgcatcattcatgatctctttcatcaagctgtcaacctgcatgccgccatcttcccaaagcggccagttgattgttatagaagccccggtccgttcgcctttttccgctttgcaatcgcgatatttcatatattcatccataaaagcgttcgccgcggcataatctgtctggcccgcatttccggccaacgccgagaatgaggaaaatacggcgaaaaattcaagcggttcatgccgtgaagcttcgtccgcatgaatcaggccgctgattttcggcaggaacacctgcttcaagtcagaactgtctttttggatgataaattgatcttttaaaacaccggcgcaatgaaaaatgcccgtcagccggccgaaggtttctgtaatctgagcaaatgcccgctctgtttcggctttgctgccgatgtccgcttgaacgtaaagaacttctgcgcccaatgctttcagtctgctgatcttctcagactgttcaggcgaacggccgatgagtgcgagcttcaccttttctttttctgcaaggtgacaagcaagcagaaatccaagaccgccgagacctcctgtaatgacatatacgccgttttgtttccagggagactgtgtctgcccgtccagtttctcaatacgttcgaacaatctgatctgccgtatattgtctttataccgaatgtctgtgcagcctgcatgagagcagtctgcttctgttctaatgattgcggccgtctcacttggcaatctctcattcttgtcacagaaggtaatcacctgagtgcgaagagccggattttccagatgtgccgttttcagcatagccccgagagcggaagacaatgccgctccatcctcaacggcgcatacaagctgaatcaatgtatgttctttcggatggtctgtcagttcccgtttgagcatacgaaatatgcgctcggcatctgcttcaaactgctcatctgcaacctcatgctcccttttcagttctatcacttccgcttccgggcaatgtgtgccgagttcaccggtgagacggggtcctgcatcggcagcgataatgagatgacgggtgtgtttttgcccgttctgcaccgccgtttccagcggatgatctttccaggcgggttcaaaaaacagaacctcatcagcaatgtcagcatctgatgtatgccgttcttcggccgaatctttcagcacacagcccgcttcattgataaggtaatccgcaaggcggcggacagaggaatattcaaaaagcagtgtcggataaaactgctgctgaaaagtctgctctaatatctttacaagcttcagcaaatgcgccgagtcaagccccatatcataaaagcctttccgcacatcaatatcctgtgccggacgattgatcaacctggcgatttccgactttatgtaagtcaccatgttttgttccggcgtttgctgttcagacacgtcttctgcggccacagaattttccgactcaccacggccgcttctgttctgctgaggcggcttctctttgtctatcagatgggtaatcatattcgcttgtctgaccctttttactgtcagtttctcacattcggccaatacgttccctgccctgtcgtaaatcgtgaagtcagccgaataaacatcaggttcgctatctgatacgccgctttcagtgcggctgtttttcgcagaataagtgtaaatcgttttcggaaacggctgatacatgcaaaaacgatcgatcataaaaggaatataaggtgtgtcattctgcttttgggccgacaatgcaaaggaagagccggcaagggtggacgcatctaaaaaagccggatgcgccttaaatttctcccggaatccttcagccaaatcactcagagtgagctccattaattcttctttatcctgaagctgataaacggccccttcatttttcataaactcgccatgctcaatatggcttcttcttgcaattccgtaaatgtcatgcatgtcccattttcggcttgcgtttttcatgaacgcttcaatattcagttcttttgccctgggcgtgtcttcttgcaaataaagctggcattccatattctcatcccggtttccgccaagcggtgtgccgttttttgctttttcgctagtaatctcaactttccagctgtcacgcgccggcgtaaaggtcacatacaggtgtttatcaaactcttcagatgttacaacaggctgcttaaaaatgatctgtcttaattctataggcctttcaccgagatacccggcggcgagccgatacagcatatctattaaagtcacgcccgggaggacgcggatttgatgaacgcgatgatcccggacgatataattcgtatggctgattttctgcaggaacgttttgacttgatcggtggcaactgccaatctatcacacctcgcttatttcaaacattgcttctgtgcccgcctcattttcttccgcttcggacaactgtgctttttcaggccaataccgttgttttcggtatactgtctggccgcctttcggttccatggccgcttttcgctctttcggaattccttcgttgctgacaatgatatgggcattattcccgcccaaaccgaacgcgctgaccccggccctgagtatctctttttttccgtcccaccgcttcagctcaagcacaggataaagcggcgaatcattaaattgaaagcgggggttcggcttatggcaatgcaaagtcggcggcagttcttcattggcaatcgccagcaaaactttgatgattcccgccgcgcccgccgcactcagcaagtggccgatattgcttttgacgcttcctacaccgcaaaattgtttttcatcggaataagcagacaagacattggttaatccctttaattcaatcgggtcgccgatcaatgtaccggttccgtgcgtctctacgtatgtcatggtgtccggatcgatttccgctgattgaaccgcctgctcaatcaagtcctgctgcgcccggggattcggcgtcgtcacgcccattgtgctgccgtcattatttatcgcagagccgtcaataacgccgtatattttatcttcgtcttctatcgctttttcgagcggcttcagcatcagcacaccgcagccctctccgattcctgttccgtccgcatcggcatcgaaagattttgaacggccatttggcgataagattctcgccgcgctcattgtgagaaaaggtttttcatcaagcaaaatgtcaaccccgcccgcaaaggccgcttccgcttctccattttgaatggcctgtacggccaaatgaattgccgtaagcgaactggagcaggccgtatccacgaccaggttaggccctgtaaagttataaatgtgcgccatatgtgcggtaataaaattttgccccgcgccaataatcgcatctttttgcaaatattgaaatttctgatgaaacgcacctgcccttgcaccggcaaaaacgccgatacggcggccccagagatcctctttttgataaccggcatcggccaaagcttccgcgctcacttcgagccactgcctttgcagcgggtctatcatcggtgccagcgtttctgaaatattgaaatactccgggtcaaattgatcaatatcgtgaataaaaccgccccatttactgatgctttttccttcttgatattcacccggctgatagtgttccccggcgttccatctgtccggcggaacttcagtgacggcatccgttccgctgcggagattcttccaaaattcttttatatctcccgctttcggaaaatggcaggccatgccgatgatcgcaacctttccccgtttcccaggcttatctgccttttttttgctccgtttcggcgtcttctgcaaagggaccttctccgcgggaactgctgcatctgccgaaaaagcttccggacaatgtacggctaaataatccgcgagctgttctatggtagggtgttccagaaggacagtcggatcaattgaaacggacggcagtttttgatcgatctttgtcagcacttgcgccagaaagatagaatccattccgtattcctgaaaaggcacatcgatatccatatgcgtttcatcgatactcagctcttttgccaaaagcgaccttagccaagattgaatatcaatccggttatgttcccgtttttttgtttcaggaggtttggaagctgctttcattcctttatgggcggctggcttggcattttccagcgctttggcgtcccaatcatgtttcacttgtgccggcagcacgacagctccgggtctttctcttaaaatgtaatcaagcatcttgagaccttcagcgtcagagtgccgcagcaatcccgtttgctcataaatcccgctttttatatccctgctcatgcccgtctcatcccatgccggccattgtatgctaatgatgccgctctcattgttttctgcaaaatagtccatgtaagaattagccatcgcataatcgctctgtcccgccgcaagaatcgggacggctgctgagacagatgaaaacaggacgaaaaatgccggcgcatcatcctttacactctcatacagactgtgaaggccgtctgctttcggcgcgagcacccgcgcgatactgtctttggatttgcggagaaaagcagggttttcacggtccgcaattcccgcgcaatgcagaatgcctccgacaggtccgagcgttgtggttacctcttttataagccgtccgacggcctgcttatccgtcagatcaactgctgagacgcacacttttacaccttgtgattccagctgccggataagctgtattttttccgaaacgacagggtctgtttgctcaagatcccactcggttttcggcggcagctcctttctgcctgtcagaagcagtttcttcacaccgtatgcggaaacgaaatgcttggcgcataaagcgccgagtccgcgagttcctccggttatcatcaggacggcgtcttttggaaacgcagcccggtctgtttgcatggcttctggttcaatctgatcagtctgccgaagaacatagctgaagcgcatgccgtccctatagcaaacagcagactccgttaagtctgattcaatttcttgtttaataaaagcagctgtctgctccagcggctcttcaggatcaatatcggcgtgacaggtgagaatatggctgtattcatgccgcagcatgcgataaagccccgctttttcaataccgtgcataacggcagccttatttttgaaggcttcaagcccttttgtaagataaagcattttcatgttttctagtccgcggccgtattcaatcagctgctgcagcgatgccacccagctgatgtcctgccgcttttgtcgggagccgcagccggtgaagtcaataaacccggaatagatggccgcgttcggaccctgtaagaaagagatgagctgattttcctgcacaatgtcagcatcattcagctgttttttcacctcggcggcaaggtcttttgtatcttcagagacgatgagcgctattttgttgttgaacggctcggatgaagacactgcctcgcacggttcccatgttttttgcaataatactgttttttgattcgaaagcggcagctgctcccgtttcggcacccaatagcggtcggctctgaacggataggagggcaggctgatgcggcgcggcttactgcccgtatacagctgctcccaatccgtgtcaaatccgtttgcccagagccgcagcactttcctgtatttctttttctcaagccaggcgctgacgaggtcagccgcgtcttcatcgtctgagaacatggaaatcgtgttattctcgcgttttttacggccgctgatgatatcttcgctgttttttcccaacagaaacgcgttcagtttttcagtcagttcctctgcggagcctgcaatgattcccagcctcgcttccatcgcgtcccgtccggtctgcagtgtgtatgcggcatctgcaagatcgatttggcgggatgatccgttttggataaaatctcgaaggagacgcgctctttctttcagccgctcttcatttttagccgacaaaacaaaaagagatgacgctttctcacgggtttcctgctgttccgtctcacttctgcccatgtattcttcaataacgatatgcgcattgacacctccgaaaccgaatgagctaacacccgcccggcggggcaggacccggccgttttcatcacgcagcgcttcccactcctttgtttctgtcacaatgtaaaacgggctgtccttcaatttgatatggggattgatgttctcgcaatgcagacttttggcgagcgtccgatgtttcagctgcatcaatactttgataacgcccgcaatacctgctgcgagctccaaatgtccgatatttgtcttcactgagcctatcccgcaatatccgcccggcgccccgtctgtttggaaagcttttttcaatgcattgatctcaatcggatctccgagtgccgttccggttccgtgcgcttctatataagtgatggttgacgggtgaataccggctttttgataagcgcttttcagcacatccgtctgagcctgcggattcggcgcggtaagtgacgctgagcgtccgccgtgattttccgctgtaccgcggatgaggccgtagatgtgatccctgtcacgctcagcctctgaaagctttttcaagacaatcatgccggcgccctctcctctgacataaccgtcagcctgatcggaaaatgttttgcagcgcccgtcttcactgagcatgcctgctttttgaaaaccgatatgcccttcaggcgtgacgatcgtgttgacgccccctgcgaccgccatatcacaatctcccgtttcaatggcttttaccgcgcggtgaatggcgactaaagagcttgaacaagcggtttctaccggctcgctcggcccgtggatatcaagaaaataactcatccggttcggcccgacggacggcacgattccggtcatcgtatacccctcgacaggaagacccgccttattgattaaagtttgatatccgcttcccagtgtgccggtgaaaatgccggtttttgttccggcaatccgttttgctgagtaccccgcgtcttcaatggctttccacacatacatcattaatagacgctgctgaggatccatcatttcagcttctttcggagatatcccgaaaaacagcgggtcaaacccggcgattccatctatgaaaccgccccatttaattgacgttttatttgcatccgctgccggatcgccgtaatattcgcgccaatcccagcgatctcggggaatttctgtaatgcaatgctccccttttgataaacgtgtccagaattcatctatgtctttcgcttgcggaaaaataccgctgattccgataatggctatcggttcggttttttcttctgattttccttttacggatacgggcgtttcccgcttgacatgaacggccgccggagcttcagcttttcttattccggcttttggagcggtttttaaactctctctttctaagccgctgaatgcttctttccattcagatatcaaatggccgctcagtttgcgcaatgtcggaaattcaaagaagatagtcgggctgagctcaagctgataagaccgatttaatagattggtaaattcagtgaaaatgatcgaatcaaatccgtattccgtcagttcgctgtcagcctcaatatctttcatgcttacctttaaaagatctgatacatgccgctttagtttctcttgaacctgatcttccagatctcttgcatctgccactgccggagcttgtccggcggcgctttgttcttcgcccagatcgaaaatatggctgcggatccgtttttcgtcgccttctgccaccatgacctgatgttctccggaggcaaaagcggcgtacagtgcttggatgcctgaggctgatcgcatggctttcattccggtctgttcgtacatcagccgttcggtctctttgtccacgcgcataccgccttcttcccaaagcggccagttgacggagagggtcttcccgctccgctcgttgtcccgcacgagacggttccggcgggctgcataaacgtccataaatgcgttggctgccgcataaccggcctgccccggatttcccatgcctcccgccaaggaagaaaacagaatgaaaaaatccagccgcacatctttcgctgcttcatcaagattgataagccctttcactttcggcgccatgacggccttccgttcgttttctgtctggttcagaatgtagttgtcagcgatcacgcctgcgccgtgaatgatcccgtcgagtgttccgtgctccttctgtatgccgcggacgagggcgatgaccgccgccctgtctgtcacgtctaccggttgatacaatacgcgggcgcccgacgcttccaagcgccgtaagcgggcggagcggtcttcatcaagcgcttccgcccttcccgttaatacgaggacagcgtttttgacgcgggaggctatttcttcagcgaaaatcagtccgatgccgcccgctcccccggtgaggaggtagaccccttcgtctttccacggaacggcgccgctttgaggcgccggcagatgacgccagtttctgacgagacgtttgccgtcttcataacggatttccgcttgttcaggatgcgcccggttttctttcagcttggcaagaagcgccgaggctgactcgtccggatcagcttggatgacttggccgtacagcttcggatgttcaaggtgagccgttttcagaaaagcggccagccccgccaatacattgtcttcccccctgtcggggacaagaagctggatcagcgtttttttcttctgtttttctttgataagacgcgtgacgatcgctgacagctccgccgcgcaggcgtcataacggtcttcaatcggaccttcgccgtcagccgcacatacggcgccgccgcttatgtcctcagcgttcattccgccatacagtgtcacgtatctgaaagactcttcttgtccgccgccttcmcccggcggtgattcctgccactttggctgaagcaagagcggtttttcctccgtttcctcttccagaaaacgggcggtgagccccgtcaatcggacacataccgcgccgttttcatcacacagctcaatatgataggcgccgtccgctgaggaaagcaccgcccacatcgtctcccggcacgcagaaaacacctgcatatcctggagggcaaacggcagaaacggccgtccggacgcggaactgtctgagagcacgagaccgatagaagcctgaagggcggcgtccagcatgctcggatgcaggatgaacggctccttttcctcgcgggcggacggcggaagagtgagcttcgcgagcacttctccgtttccggcatagacggcgtcaagcgcctgatgagacggtccgtaggtgatgccgaggctgtcgaacgcttcatagcactcagcctttgacaagtgacggccgccgcagcgcgcctgaaccgcttctacatcgagaacaggagcacgttccgtctcttcgagcacggcctttccctggaaaaagacaagcggctcttctccttcggcatacgcttcaaaagcgatgtctccgttttcttccggctgaagctttacatgaagcgtcactccttcagaaagcgccgtcaccggacggagccaaacgatctgtttgagccttacacccgttttcccgccgggcaagtcttcagcagccagcgtaacggcggcccgggccatttctaaagcagccgcgcccggaagcaccggttttccattgacgatgtgatcggcaaaaaacggttcatatcctgaaaaaacagaagtaaaacgctgggcggtaaaggtcgatgtattcgtatggagcagcgggtgaagcttttcacgttcagctgaattccggcttccactctctctctgaagacgatcggacgcccaatacgtctgcctggcaaacgggtagcccggcagattgccgattcgcggcaaaggtctgccataaagcaagtccccttcgatttcataaccttgacaataaaaatctgccagcacgcataacagctcctgatattttctatggtcagaatatgaggcgctgcacttgccgagcacttctattatgtgctcctgaatatgctgacggcctgcaaagtgctgcggtacttttcccgaaaacacataaggatgatgttcattaagctttgcctgcttccatacatacactgcgtcatcagcatcttgaaccacgatggcggcgcgatggttaaagtgatgccgtccttttaacaacgtatagctgagctgggccagatcattttctttcagtccgccattttccgcccaagtgatcatatcttcgattttttcctgaagggcctcctttgtttttgcagacaaagtcagtaaatatgcaggggcatccggatgaggtgaagcactgcgcttatagctttccataacgacatgggcgtttgttccgctcatcccgaatgcgctgactgcccccattcggtttttacccggcagagaaggccacggtttacccgttttattcacataaaaaggactcttctcccagttgatatagcggttttccccgctgcaatgcagactggcgggaatcatttcacgggagaacgcctgtaaaagactgatcaaactgacaatgcctgacgcggcaaacgtgtggccgatattggttttaattgatgtgagcgcgcaaaaagcttcttcgtttgtataggcagaaaatgcgtcataaagcgcgttaatttccaccggatcaccgagttttgtacccgtgccgtgtgtgacgatatattcgatatcttcagggttgatacggccccggtcataaacggaagtaagcagccgggtctgcgcgaggccgctcggagcggtaattccgtttgttttcccatcataattgatgccgctcgcccgaatcaccccgtaaatcggatcaccatctttttccgcctctctcagcggcttcagaacaaccgccgcggccgcttcccccggaaccatgccgtcagcccttttatcaaacgcgaagcatttcccgttttccgacagcattccggctttatctatcgtttcaaaaaagtccggggtattcatgatattcaccccggccgcaacagctgttgtgcactctttattctgcaggcttaataccgcctgatggacagaaacgagccccgaagaacatgctgtatttatcgccatcacaggaccggataaattcaagtgataggccagccgcgccgccaaaataccgttatgatgagacgtgacattgcctttgtcccgtgttaaaaggtgataatctccttcttccgcccccacaaacataccgatcgtctgctgcttgatgtgactggcgccgtagccggcgtcctcaagggccctccacgcttcctgaagaagcagccgctgtttcggatccatcgtttcagcttccctcggcgatatttcaaaaaataaagggtcgaattcgtccgcccccggtacagcgccgagtttccattttgaacttgtgaagcctttttttgcgaccggtgcgacaacgtccttttcctgaaacagaatgtcccacagctcgtccgccgtgcgcgcctgaggaaatcggccgctcatgccgataatggcaatggaatcagctgcctgactgccctcggttccggcgttcagcttatttcttcccctctgcttctttcgcttttccgtttctgccttttcaaagacagattgatctgcggattcaggtttcttttcttcatagacatgctccatgacggacttgtgttccgtcagaaaatagcggacgaccttctccagtgtggaatgtccgaaaaacagggccggtgtcacttcaattccgtaatgggcggacaaagaagaggcgaattccgccaaactgatagaatcaaagccgaaatcagccagattgtcagcgtccgtcagtctgttcttgtctattttcaaaagccccgccgccagttctttcacatcccagcttacgcattcttccagtgtaaagcctttcatttcactccgccttcctgaaaacggaacgttcctgtttacagaacccgaaatcggccgttcgccttgatctatctgcaggaagcgtttggccctcgacggaaaaccagccaggacgagatactggctggacggctggactaacaatgtttcaaaagcttcgagtccttcctcagtgtataaataacgctgtccgcttgattttaaatacatagcggtgctttccgccgtgccgacatgcatccccccttctttccaaagcggccaattgattgcaagtgacttgccgcttctgagtccgaggctcacaagtttatcccggtgacggacaaaagccatttggaagcggttccccatcgcgtagtcacaagaaccgaagtctcctaaaatcgctgaagaagaagagaaacaacagaagaagtcaagcggctcccgtgacagaacctgatctaacaccgcggtgccgtccgcttttggcgataagacttgctgaaaggtttgcagatctttctccagaatgctttcagtgccttgaagacctgcagcgtgaatgacaccgtgaatcggcccgcatcctttctctttcacttcttgcaaacctttctccatctgagcctgatctgcggcatccgcctgcacgtaaaacaccttggcgcctgattttgccaatctctttatcttgttcagcaccgggccgtctgccgctgatctccccgtcaaaatgagcgtaaccggtcctttttcagcaaaatatccggcaaataacaagcctaatcccccgcatccgccggtaatcaagtacgtttttccgctctttatcacacgcttctcaacaggggcgatatccgtctgcttcatttccatgacgtggcggatttcctcactgtacatgacactgcggaacgactcgctgtgaagttcttcacatacgttatggatcagtttttctaacggtcctttttgttcaaaataaaccgcggccgtatccgtctccggcaagatcagtttcagcgaccgttccagcccgatccatgactcagcgtaactgatatcggtatcggtcccgcactgagcggaaagaagaattcgcctcggtttagaacgcaaagaagcagctgcgcggatcacatgatacagaatggaatagtctttcacggccttttcatcttcaagcggccatccatataaaacggcatccgctttgcctgcagccgtttcaatatgccgaaacgtttcttgatatgcttgtccgtcagtgattttaatttgataatgcgtgtttgaaagcttttgagtttcctcaccctgtgaaataaaaaacacgccggctcccggataaagggattgtaaagactgataagcatgctttctggcagcttctcccgtaagaaaacagatgaccgttttcagctcttcatgaatggatttcttcagaggctgctgagtccacatttcttcaaatatcatcatctcggattgttcctcttgcccgtgatcctgctgagacggctgtctcattcttatccctttgatttctgcgcagacaatgccggtttcgtcacataattgaatgtcacagccggtttgattctttttattaatatacatccacatgctggatgagcacggacgcatgacgcgcagttcttcaaccgcttcaggcacgatatggactgacggctccgtttttgccaggacatgaaaagctgcgtccagaaattccggcggtatatgatatcccggattacggccgctttcatctgtgagagcaagcttcgcccaaaccgcactttctcccgcataaagcttttcaacggtgcggaactccttactgatcgttacacctgatgtgcctggtgtttcataatcgaatgacagcgggcggcagtctttttgtaaggaggcaatatcaagcacgcgggatggctgtatgttcccttgttcgatgattccataatgatgcagcttctcttcgtcactgtatatttcataatggatgccttcctcgtcttcagacagaagggagagattgacgcccgcaccgtgaagtccgccggtaatcgggtcagtccatgccgctgttcggatccatatctctttttcttcagagctgtctgccgcatgatgaaaagccgcaagcgccatttctaaataaacggctgccgacagaacccgctccccgctcacatcctggaaaacgtgttcccggcctgtaaaagatgtatgatagctttgctccgccaaggttgacgtattttcatgcaggaaaggatgcacatattcagttgttcctgtttttggttcttcccgcttcatccagtagctttcttttgcaaatggataagacggcagactgatacgatgcggcagcgcgcctttatataaagatgcccaatcgacgggcgtcccgtgaacccaggcattcaaaagactgtcaaattgacgtttttccatccaatcactgactgtgccttccgtctctgtgccagcactatcactccggcccgtaaacaccccgcttacagaaccagcatttttcagaaaagcagtcagcttctgttccaattcagaaacagagtccgctgtcatcgccagccgttcttccatcgggaccctgccgacttgaagggtaaatgccgcgtcaagcagattcgcatctgtaattgttccgtttccggcggcatccgacagcaacagagcccgctcgcgcaagcggtctttatcttttgccgataaaacaaaaagcgccggacggccggtgtctgccgaagtcatttcagccggttcatactcttctatcagcaggtgggcatttgcaccgcccgctccgaaagaagatgtacccgcgattctcggatattcccgtgttactccttcagattctatgaccggccgtctccattccgctgtttcctgctgcacgataaaaggagaagtttcaaaatcaatttccgggttcagctgctttgaatgcagcgacggcaccagatatccgtgtttcatctgaagaagaattttggtgaccgcagcaatgcccgccgcactttccaggtgtccgatattggatttaacagaaccgatggaacaaaattggtttgcatccgtatagcggcggaaagccttggttaacccggcgatttcaatcggatctcccaaggaagtgccggtgccgtgggcttccagatagctgattgctctcgggtcaatccctgcccgctccatcgcatctgcgatcacttctccttgtgcattcggattcggaacggtgaacccgttcgttttgccgccggcgttcagagcgcttcctttaatgacaccgtatatatgatcatgatcttcaacagccttcttcaacggctttaacacgatacagccgacgccctctccgtcaacaaacccgtcagccttatcaccgaacgctttgcacgcgtttgacggtgacagcattctcatagaagaaagtccgatataatgaaccggatctgtaatcaggtttacgccgccggcaatcgcgcattcagatgcacctgttctgatgctttctgcggcgagatgaatggcggttaaggatgaggagcatgcggtatcgaccgcgatgctcggaccgtgaaaatcaaacacataggatacgcggttcgggataaagtggtagtgggcccctgtcggatagttgccgttcataacacccgcaaagacaccaacctttttaccggcgcatagtgaatcaggggtatatccggcatcctccagggccgcataagcggtttccagaaacagtctctcctgcgggtccatgcgctccgcttctttcggagagattttaaaaaacagcggatcaaatttatcaatatctgttaaaaagccgccccactttgtatacatccggccttccttaccttttgtctcatcatagtagtcccgccaatcccagcggtctttcggaatttcggtgattccgtgttcaccggtctttaaccgttcccagaactcattaacattttcagctccgggatacctcccggcaagaccgacaattgccacttcaaggtgttttgacggcggttcggaagcgggcggcgctttttcagaaaaagatgccgcttggcgcttcgtcaatccggcgctttttttgcggctttgctttttctgtagaatgtgcggcgccttttcggcttctttatttgtcttgaaaatcccagccatatcatccggtcttgagctgacgagatagtccgctaatccgccgattgtcggatactcgaaaaacaaagtgctgctgatatcagggacgtcttcccgcacgcggttggtcagctgtacgattaagatggaatcgattccgtattcttcaaggggcgtatggggttgaacgtcctcaatcggcatctttaagatggcgctgacgatctgtttcagatactctgtgcttttttcaagcaaagagccggatgatgccgcttcagtatgacggacttcttcagaaaattgcgcatgcagttcgcgctccttcgattcagccaagtatgcggcaagttctcctatcgtccggtattcaaaaaacagcgtgctgctgatatcagggacgagatcccgcagctcattcgtcagctgaacgatcagaatagagtcaatgccgtattcatccagaggagccagcggatttatctcttctgccggcatttttaatacttttgccgcagcccttatcagaaaagccgctgtcttttccgaaagcccctctcccgcttgtttgatggggagctgacgatcagaggatgtttgcagtacgtttgattggcgcttttgcgcggtgtaagcttccctgctctgcctgatgactccgttgcttttcgccgtgataatctgctgggtgtgcagacgttcgttttcagccggaaattgaatggaatgaaaaccttcagccattaaaacggatttccatgtttccggataaagaccgggacaccccggaatccgcagcgcctcgtcttcgtacagccaccagccctctaataagccgaatgtaacatgtgtaaacggcgtatgcccgcccagttcattaacgagcagcaaaccgtcctttttcaatacggcttttgccgtccttaaagttttccggatatttttggtggcatgcagcacgtttgcagcgatagcgatatcgtaggttcgcagatgtaatccctggcccgccgcaggctgctccacattaaacagctgatacgtcaaatacggattgtccgcgccgtattccttttcggcatgcattaaaaaagcttttgacaagtcggtataacagtattcctgaatatggttttgataggggcggagctttttaaacagtgtgctgctcgttccgccggtgcccgctccgatctccagcagacggatgtttgcatcaggattgtttttcattacattttccacataaatacacgcttcatttgccagcacatcgttgtaataatcagcgagaatattatgcttatagattccttcaacaagctccattgaagaatcgggaaacatcacgtcagtggcttttattttgcctgttaaaatgtcaggcaaagcttgaatgacggtattcgccagcagaacctgcgctttcatatccggatctttcagccattcgtttttcttcttatgccactcttcccaaaccgcggccgtttcaccgcttttaaaatctctgtctaaaagacggatgctttcttccagccagcgttcatataaaggcagacaggaagccgccggcgcttcgccggtcagacccattgaacgcagcgtcacccgcagcacttgcagcaaaagccgattcaattctttcatttgattgcttatttctgttcttaaggataactgtgtacggtctttttgtttgtctcccttacccaaaaccttatcctcctaagaaaattaaatttgctccgtcattttgacaggcaatcagatagtcacaaattcatgagggttcattccctcgatcggaatcggcttggtcagcttcatcagccccatgcgggagatcggctgcgtcagcagagtttccagcgcctgcatcccttccgcccggctgatcagcccgagaccgattgcactcagtctgtcaaactcttcagaaatgtgattgtcagcccgctcccaataaccccagttcatcactttgacccggcatgacagccgtccggaaagctcatgggcaaatgcgtctttaaatgcgcaccccgccgcataatgactttgattcggattcttaatatatgaaataaccgaagagaaaaagagaataaagtccaaagactctttcgcaaatacttcggcaatgttgacggaaatatccactttcgccgcaagaccggcgtgaaactgtgattcttccatatcttttacgctttcattcgcaaataccatcgctgaatgaacgacgccgctgatggtgccgtatgtgtttttaatctgttcataggcgcgctgaagcgatggaagatcagaagcatctgcggctatatattcgggagccgggcctgatggccggtaccggtctattttttggcgtatccggctgtccagcggccgcctcccgatccagacgactcgggctttatacgtcgtcactatataatctgtccaaacctcgccgatgcctcccgcaccgccgatgatgacatatacgcctccatagcggtaaggaacactttcagacggcccgctttggaccggaagcaattgaggccggtaccattcctgatgtctgcgcacccatgctttacccgtacggtcgcgggacaggctgaatatgtcttctgcggggaaatcccccccgtcttcaagatcggcgagacggatgtgccagctcggatgttctttagcgagagacccgacgaaaccgtgcacactggaatgagcgggacgcacctcatcatattgggtgataggctgtgcttggtgcgtaatcaccgtcatcccgagctgctcctttccatacccgagaccgataagagctttggccgctctgaaaatctgcagcaccccgcttttttgatcatggctgtcagaatcagccggctgaggggcaaaccagatcatatgctgaatctcaccgagacggcggagccgatcagatatcacttcaacggaagcactttggccgatatcaaatcgcacagctttaggaaacaatcgtaaaaccgcgtccgcctgcccgtctgtaccgcctatgatgacagcttttgcttcagaaatggggaagccggtttggttgtctatcggttccgcgtcccatacctgcatcagtttgacggctccggtaaggttacccgggagatcgtattgcttattatcggttacggccggcgcactttcggccatccgggcagaaaatccttttatccttacacacacattgccgcgttcatcacatatatcaatgtccattcttcgcacggccggtgtttcatgcgtcacaaatacggccgcccacatgtttggactgcacggatgaaaaacggtcagttcatgcaattcaaaaggcattaacggctgctccggataacccgcttgatcttcattcataacgccgatggccgcctgaaaagcggaatctatcagactcggatggagcacaaactgttcggcttcatcagaaacggaagcggggagcaccaatttagccaaagcttctttttccccgcaataaatgtaatcaattccttgatgtgaaggtccgtatacaatttccgcctttgcaaacgccgcatagcagtcttcttttgacagcacttttttgcggcatcgcgctttcagctgttcaatatgcaaaaccggcgcctcagacagcggctcaatcacagcgctgccttcacaataaatgtctgaatcattttcattgctgtacacttgaaatgaaacattgccgttgtcctccaaagaaagccctgtcgtcatacgcagaggctcttttttatgaacggcctggcgtatccagctgatataccgcagcgaaatgccggttttagccgtgtatccagcggctaacggcgcggcagccagttcagccgcggctctcgccatttcaagataagccgccccggggagaacacgcttgtttcggacgatatgatcggctaagaagaattcatctccgttcagtatcgtactgaatttttgttctaacaaatctgatgtattgcggtgaagcagcgggtgaagcctgctttctgtatttgcggaagtgacgggatgatcgggctccggtatccaatatcgttcctttgcaaaagggtacgtcggcagactcatcctgcgcggtttctcctcccgatacagccgcgtccagtctatctcaaatccttttgaccacagctccgcaagttttttgtaagtgccgctgtccatccattttcggatcagctcctccgtatcctgatcatcattcaggaaacccctgatttccgttccgctatcagaccgcccttgaaagcagccgtcaatctgccgttttcgttctgtaaattcagttaatttcctgatcaggtccgcttgatcgttcactaaaaaaacaagccgctcttccattgccagccgtcccgtttgcagcgtatacgccagtgaccgcaaggaaaaagattcatcaggctgcttatctaagccggactggccgaaaagaccggaaagaatattcttatgtttctcatcgtttgtaagacattctgctaaagtccggacggaagtatgctgtatgagatcagtcatgtctattgccagcccgtattgatccgtcatcagctcagaaaactgtgtcagctgcatgacatccaagccgaattccttccaatcctgttcatcatttaccgagccggcctctacatgcagaacttcggccagaacacctcgcaacgctttttccagctgattttgcattgtatctattttgtcgtgaagcggaccgcttccttcaagcgctttatctttgagaaacatcagcaggcgggcagcgtattccttcagccgctccggatttttcgctgatagaggcacgatatacggtctctcttgatcctccgtaataccggggtttttgggcctgtactcttctaaaatgagatgaacgtttgaacccgtcgccccgaatgaactgatgcctgcgcgtctcgggcaggcatgttcacggccgttctctgtatacgccggccttttccatgactcggttttttgctgcacgtaaaatggcgagtcctctaaacggagataaggattaatcgtctctgagtgcaaagaagggacaagcgttttgtgaaacagctgcaaaaccgttttatgaagcccgctgatcccggcagctgattccgcatgtccgatattcgatttaacggaaccgatcgcacaaaattgccgatcctccgtaaacgtgcggtaagctttaacaagaccttgtatttcaatcggatctcctaaagaagttccggttccgtgcgcttccacataagaaatcgtccggggatcgatccccgtcttttcaagacattcagctatcatatccccctgcgccacggggctcggcacggtaatcccgctgacggtccccacgtgattgacggcgctgccttttatcaccgcataaatatgatccttatcttcttcggctttgtggagcggcttcagcagcacggctccgatgccgtcagctgagacatagcctgtgcctccttcgccgaacgtgcggcacagcccgtcactcgaatgcatatccatcaagccgtatgtgatatattttgtcgggtgcaatgataaattgacgcctccggcaagagctgcttcacattcaccgcgtctcagactttccgccgccatatgaacggccgtcaaagatgacgaacacaccgtgtcaaccgccatgctcggcccgtgaaaattgcaaaaatatgaaacccggtttgcgatcggcgcatagttcaagggataaggaaagaccagccctttggccgcagcttcagcgccggcgagagaataatccatatgcatcaccccggcaaacacaccgacgttcattctcttattcggccctttcggctgaacaattgtttccggggtgtagcccgcatcctcaatcgtttcccagcatgtttctaaaaacaatcgttcttgcggatctttagcttctgcctcccgcggagaaatccgaaaaaatttcgcgtcaaaacaatctggatcgtctataaaaccgccccatttggaaatcggcttgccggacggcgatcgcaaatgctcatatgtcctcgtatcccagcgggaacgaggcacttccgttacgctgttttctccattttttaaatttgtccaaaattcacgaagatttttggcgccggggtaccgtcccgccatcccgacgatcgcaatatctccattctgcgttccggctgacgccgattttttcacgcggatttgggttgtcctctttttttcccggggcaaaggctcagcacttgaatgcccgctttgagcatggccgaaaccggctccgtaatgttcgcacaaatatcccgctaattccgcgattgtcgtgtattcaaataacagtgtcggcagtagctgcgttccgattttttgttcaatttcctttaccatgtccaacagccccggagaatccagccccatttcataatagccgatatccgggtcaatctctttcacaggtttgttcaatcgggcggcaagcaattcttttaaataaaggatgcactgttcagtaaggccggcggaagcctccgcacggcggggctcagaaggcgccggttccgctctttgagccgggacggcattccgcccgtcaggttctttcttttgccgtttctgattgatcagttccgggtccctcaccagtttattggcgaagtttttcagttcgccgacttttctgccttcctcattgaaaaactccattgtcacgtaaacgagatctttcttacgggtgacggattctttttttatcttggtgatacatgtcgtctgcagcaattcggcgcaataaaacgattcataaaacagcggcagaaataattgcccctccttcctcgtcaaaggagcgagatatacattggagccgatgctgctcgcatctatcaatgcgggatgaaacatcgtctcttctgcatgttccagctgatccttttgcaccgacagatcaatataaatctctttttcagtttggtagacgcttccgcagcctttcatcattcctgaatgaaccagttcttgatccctgcattccgcgtaaatgtcctcaagcggtatttctgccgccgtttgttttacggcatccatccggacgctttcttggaagccggcgggattgacggaatgcatttgcgccgcggcatatacctttgtctctgctgcttcgtcaccttgtttttgccctttcacctctaccttccactgcccttcgccgttctctgtacaattaacggaaagcaggattgtttctccctgttcaggagctaaagggtgaaaaatcgataagtgcctgagttcaaggccggcatgaaaaaaaccgttttctctgaaagtctgatagatcaggtcaatataagccagacccggcagcagttcctttccataggctttatgatgtttcagaacgggatgctgattgttaataagaagctgctcttgcatatgaacttcctccatatcgacgttcaattttcagcgcaatcagtaagtcttcatttgtttccaaaacgtattcgggcgggacttatgtgcgtttccatgcaggctttcggctttgtccggacgaatgggccggcgttttaattcctgtctcggcaaaggctttctaaccggggtatacgcctcttgctcccaggcttccactatgacatgggcattcgtccctccgtcagcgaagctgctgacggcggcaatccgcggtgaatccgtccattcacgcagagcgtgcgaaaaataaaacggcgaggcggacagatcgtaatgcgtcatcggctctttgcccgaaaggaaaggcacacgcattcggcgcgagagcataagcactgttttaatgaatccggcaatcccttcagcgcataacgggtgtccgatattcggcttcatcgaccccaattcgcaaggcgcgctgttttgcatacggtacaccgcttcaatcgccctcagttccaaaaggtctgttacttcagagcctgaaccgtttgcttcaatgtagctgatatcctccgcttttctgccgcttttggcaagcgccttggccatcacttctttctgcgcctgtatattcggtgtggcaggccccgcggttctgccgtcattgtttacggaaatgcctttaatgaccgcatgaatccggtccccgtcttttacagcctgggccgctgtttttaaatacaccattccgacgccttctcccaatacgatgccgccggtgcggcggtcaaaaatatgaaacgcaggctcttcgcttaacagattgcgaagttcgaacatccggtgggtttgaccggattccagcagactgactcccccgaccaccgctgagtcgatttcaccgcaagaaagcgcctgtatcgccatattcataccgacaagcgctgaagaacaggccgtatccaaaacaagactcggccccttcaaatcaaagaactgagaaagattggccgctaagtaattcggaccggctgcgactatcggattttttgcatgcttcagacggttttcatcaggcatactgccgccgcgtcctcctaaatagacaccggctgacctgcctttcatttcttgtaaagagtaaccgctgtctctgaacagatgaagcgcctcttctaatataagaaaggactggatatccattgccttgatgtcttcttcgggaataaggaaaaactccgggtcaaaatgcgttacattttgtaaaaggcccgcataatccgccttctccgttttccagcgctctttcggaactctttgaatggctgacgttccttcagacagcagcttccaataagcttcaattgattcagctcccggaaaacggcaggacattccgacaacagcgatgtcttgcgccgctctagcacgagaaggctgaataacagcggctgctgtttgtttgggagcgtccgggatttcaggctgaaccggttttgaaacggcagctttgatttccggatatgctgtttcaagccatcccgccagcgcagcaaccgtagggtattcatacagcaccgccgggtcaaggtcagctttgatcctctttccgatcgctctggacacttgggcaagcatgatggaatcggctccgtaatcttgaaacggtgtatcagattcaaatcttgacggctccagtcttaattcccggcagcaaatgcccgtcagccactcctcaacgctttctgtatcggcctgttcctgctgctttgtttcagtcaggccggatgaaagcagcagacggtcaggctcccatttttccgggtgaatgacggccggcataataacagatccgcaatcgcctgccatgatggcatcaaacaggctcagcccttctctgtcagtgatgctctttaaaccgcttttctgataggcccggctttttgattcgcccatacccgtttctttccagctcggccactggatgctcagcaccggaaaaccttttgcagccgcaaaataatccatataggcgttagccatggcataatcgctttgtcccgctcctaattccggcatcacgccggacactgaagaaaacagcgcaaaaaaccggagaggctccttgtgcagcgcttgatacaaaaggtccagtccgtctgttttaggttcaagcacgggcatcatctgttctcttgttttgcggataaaggccggatgatcgagatctacggctcccgctgcgtgtaacacgcctcctatcggccccatttgatttttcacacggctgacggcctgctcatattcagggccggaagatacagacagcacttccgttcgtacacctttttgttcgagctctctgattcttctcaccttatcggaaaacggggaattccgtttgatatgatcatcccattccgctttcggcggcattgtttcttttccggtaagcacgagtttcgtgactccgtaacgttcggcaaaatgccgggcaaataaatatccgagtccccgggtccctccggtgatccagagcacatggtctttcggaaatgaaaattctttttcagctaagctgtttgtttcctttaaccgcgcgtgatagcgcacaccgtttcggtaacacacttcgatgtcttcagaatcgcgaaaaaactcatctgcgatctggtttgccagctcaggatcttcggcagtccgttctgcatccatatgccgcgagcggatatccttatactcactttggagcatccggtacaatccggccttttttgcacctgagagatttatcgtttcatttgcaaagggttcaagcccctttgtcacacaaagcagctgaagctttcggccgcggtttctgttgtcaatgagagactgcagacgatgaatccagccgtcatcatgattgatttccgtcccgcatccggtcacatcaatcagaccgccaaatcgggccgcgtccccggatatttccggtgatgcagcgtcaatgatttcagactcggggaaataacgggacagctcaacggctaaatttcctgtctggtgatcagcagctattccgatgacgccccgcacttccttagccggaacacggctgctttctgcccagcttttctgtaaaaagcggatttcacgaaatgtttcagaatgtgattcagcatcacgaacattgtccggcgctgcatcgtccggccaataccgatcctttataaatggataaccgggaaggctgatgcgatgcggcaggctgccgttataaagctctgaccattcaaccttcagcccttttacccaaagttccagaagcttcgcgaatttttttcgtttcatccatttacggacggcttcctgcatatcttcatccttaaaaacggctagaatgtctttatactgtttgctttttcccctgaagcagccgtctgtcccgccgtcaataaaacgctgcagtttttccgctaactgctctgtcgacgtcacgataaacgcagcacgttcttccatcgcttctcttccggtttgaagggtgtaagccgcatcccggaggctgcggtctgtgacgtcattttttctgatcgcttgaagaagctgctgcgcccgctgcttcagactggcctcctgtttggcggataataaaatgactgcgggatcttcatctgtgaatggctcataaatctccctatcaggttcaatatattcttctatcaatatgtgggcatttgccccgcccgcgccaaaagaagagattcccgagattctcggaatctctttttgcgctccgttttcctcaatgaccggccgtttccagtctgccaattcacgctgcaccacaaacggcgtccggtcgaatgcaatattcggattcaattttctgcaatgtaaagagggagccagctgtcgtttttgaaactgaagcagcagtttcgttacaccggcaatgcctgccgcggcttccaaatgcccgatattggatttaactgagctgatggcgcaaaaacctttatctgacgttttcgtttgaaatgcgcgggtcaaaccgtctatttcgatcggatctccgagttcagtgcccgtgccgtgggcttcgatacagctgatcatccgcggatgtattcctgatttttcaagcgcgccggaaatcacgtcagcctgagcgctcggactcggcactgtatacccgtttgttctgccgccgtgattgatatgagtgccgcgaatcaccccgtaaatatggtccttatcagccatcgcttttgacagcggctttaacagcacggccccgacaccttcaccgggaacaaatccgtccccgctttcaccgaaacttttgcacgttccgtcttttgaaagcattcgataggcgctgagctccgcataagccgaaggatgcgtatacacattcacaccgccggcaatcgccatgtcgcattcgccgcgaaggatgttttcacacgcttcgtgaattgcagtcagcgaagatgagcacatcgtgtcgaccggcatgctcggccctttcagattaagaaaataggaaactctgttggccgctgaactgaacgacgttttcggctgcagggtgccgccgtttttccagtacattccgtacccgtttttcgtaatgcccgcaaaaacgccgacccggccgttatacaaattctcaagctgttccttcgtataaccggcatcctccagcacctgccagcacatttcaataaagagacgctcctgcgggtccatattcaaagcatcacggggtgaaatttgaaaaaacagcggatcaaagaaagcggcttctttcagaaacccgccccgcttactgtaacttttcccttctttcacggccgcttcaggatcagggttgtagtacttgtccttttcccagcgctcttcgggaatttccgtcacacagtcttttccggccgctaagttatcccagtactcttcaagtgtttcagcttgcggataacgtccgctgactccgataatcgcaatcccttcttttgtctggttctcattggaaaaagcaggccgtttctttcgcttgataaacgacggaagcaccggaaaatcttcatttgccaaaacctgttctgatatgcctgaacggtggtcatcatcatttgtccattttcggcattcttttggataatccgtgacaaagtgagctgccagagatcccagtgtcttatattcgtaaaaaaccgttttggaaaggtcaccgaaaagcagagacaattcgcggttcaatttcgtcacagtgactgagtcgattccgtaggtttccagcggctcttcagtatctatgttggaaacagcaatttttgtagtcagggcaaacagcgttttgagctgaagaagcgtttgttcatacaaacgttcactgcggtgttcggcattggtttttccgggagcgcccgtcttgatgacaggctgcagcttcaaccctgatagggaagcccatattttcccttcttcgtcacataaatcaatataaaagctccccgccttctcttgtatctcggcccataccttgtcaggacaagattcataaaacaaaagctcgtccaatgaaaccggggcgagcgttttatattctttgccgccaagcagcgcgcatgcctctgtcacacttttcatcacacagggagggaggccgaatcgggcggattctttttggtttgtcaatggaattgatatgtctgccagcatccgtcctgctgaggcgtaaatacgctcaattcctttcatgtgctcactgtattgaacggtatcgttctgagtgatggcttcaatttgctgctgatccatcagggaaccgctgttttccttcaagcggctgatatccagcatgccaggcgcagcatcaactggctgaatcatcccttggctgtacacatcatgatgactgaaatcggcagaaaatggattgtaaatctcaaaccttttggcttcaccctctgcgggtatcagcctgatttcgatatggaacggctcagcctcagtcagaatgggctttgaccacacgatatgtgtcagccggacagcctcagtctcctttactgtcaaaacagccgcagctctcgccatttccaaaagaagttctccgggcataagctttttacgctgtaaagaaacatcagcgagaaaaaattcccggccgctgaaagctgccgagaatccctgtcccgtttcatcggaaatatgctgctgagcaagcggatgaagggaagccgcttggcgaagtcccatccgcatatcataatcgcgcaaaatgccgatcgcatcctgttttgtcatttttttatttttgacgtcagaaaaaacccggtgcagaaactctttcatatggtttcctccattacgctaatccctgtaaaaaccgatcgttctttttacagcggcttctatgcttatttcgtttttctccaattcatcaagcaggcgctcataagtctcaagcggggacgtatcaatctcataagtctcccggtgccttatatgctgcgcactgtgcggtatccagcaatgtgttttcgcaaaaggatagacgggcaggctgactttttttggcctttggtccggatataatttattccagtcgacatgtaaaccttgcacccataattttgcaagcattgcatatttgcctgcttcaatccattgatctacggtcccgctcatttctgcgttgtccgtcatctctgtaaacagctgtttcatcgctttgttccggcctgtaaagaaattctgccccgtctccttgccgctgaggaaatcattcagcgcgttcgtaagctcttcttttgtttcagcaatgacggcaaggcgctcttccatttcatcccggccaagctgtagcgtataagcgatacccgcaagagctccgtcagctgaatgtgtcttttccaaatatctgcgcagctgttccgcacgttccttcagctgttccgccgtctttgccgagagaatgaataaggtcggctgaagttcaccggacgtccattgtttctcttcaacaggagaaacatattcttcgagcacgacatgagcattgacaccgccaaatccgaacgagctgacacccgctcttcgcggcagttcattcccgctatcatcagccgctgctttccatggctgagtgtcgcggacgaagtaaaacgggctgtcgtcgaggctgatatacggattaacggtttcacaatgcagacttttaacgagcgttttgtgctgcatctgcaaaataatttttaaaagcccggccatgccggccgcaagctctgtgtggccgatattcgttttgacggaaccgatggcgcaatgaggctgatcgggtgccgttactccggctttctgataaagcgctgcaaaagccgctttgagtccgttgatttctatcggatcaccgagcggcgttcccgtgccgtgggcttcaatataactcactgtacgggggtcgatgttcgcttgctgatacgcttttatcatgacttctgtctgtgctttcggattcggtgatgtaagggaagccgcccgtccgccatgattttccgccgttccgcgaataacggcataaatacggtcgccgtcacgttccgcatcggataatgttttcaaaacaatcatgcccgcaccttcagctctgacatacccgtccgcttgatcggaaaatgttttgcatcgcccgtcttcactgagcattcccgctttattaaagctgatatgcatatccggcgacacaatagcattgacgcctcctgcaatcgcgatgccgcagtctccggcctgaattgccctgaccgcacggtgaacagcgaccaatgagcttgaacaggcggtttcaatcggttcgctcggcccatgtatattcagaaaatagctcatgcggttcggaccgattgacggaaccgtaccggcggcggaagaaccctcaatctctatatggaactttgaagcttcctgagcgtaaccgctgtttgtcgtgcctgcaaaaatgcctgtatttgttcctgacaggcttttggcagagcagccggcatcttcaatcgctttccatacatgcatcattaaaagtctttgctgaggatccatcatttcggcttcatgcggagaaataccgaaaaataaaggatcaaattgagcggtttcatcaatgaagccgccccactttacattgctcgcatttttatctttctgcggatctccgtaatactgtctccagtcccagcgctccggcggtatttcagaaatgcagtccttttctccggctaaattctcccaaaacatttccggattttcagccattggaaatgcacagctgattccgattatcgccacgggctcaggtgcagctgcggtttttgttttaggaagacgggacggaatcgagaatggctccgtcttcatttttttacgcacaaccgatttctccgtttctgtttctgcctgtgagccgaatgtatccggatgttccgtcagcaagtattgggcaaaacgaaagactgtcgggtattcaaaaaacacagccggtgtcagttcaagcccatacattttatttagttcatttgcaaactgcgtgaatgaaaccgaatcaaagccataatctctcatctctgattcagcatctatctcgtcttctttcaccttcagaatgcctgatatcatatgtttgagttccgcttgtactttattcggcatatggacgggcgtcttccttgacacatgaatgctacgggacggttccggcgtttcaggcatcaggttttttcgaatccgtttttcgtcgccctctgccaccatgacctggtgttctccggaggcaaaagcggcgtacagcgcttggatgcctgaggctgatcgcatggctttcattccggtctgttcgtacatcagccgttcggtctctttgtccacgcgcataccgccttcttcccaaagcggccagttgacagacagagtctgtccgctccgctcgttgtcccgcacgagacggttccggcgggctgcataaacgtccataaatgcgttggctgccgcataaccggcctgccccggatttcccatgcctcccgccaaggaagaaaacagaatgaaaaagtccagccgcacatctttcgctgcttcatcaagattgataagccctttcaccttcggcgccatgacggtcttccgttcgttttctgtctggttcagaatgtaattgtcagcgatcacgccggcgccgtgaatgatcccgtcgagtgttccgtgctcctcctgtatgccgcggacgagggcgatgaccgccgccctgtctgtcacgtctaccggttgatacaatacgcgggcgcccgtcgctgccaagcgccgtaagcgggcggagcgctcttcatcaagcacttccgcccttcccgttaatacgaggacggcgtttttgacgcgggaggctatttcttcagcgaaaatcagtccgatgccgcccgctcccccagtgaagaggtagaccccttcgtctttccacggaacggcgccgctttgaggggccggcagatgacgccagtttctgacgagacgtttgccgtcttcataacggatttccgcttgttcaggatgcgcccggttttctttcagcttggcaagaagcgccgaggctgactcgtccggatcggcttggatgacttggccgtacagcttcggatgttcaaggtgagccgttttcagaaaagcggccagccccgccaatacattgtcttcccccctgtcggggacaagaagctggatcagcgtttttttcttctgtttttctttgataagacgcgtgacgatcgctgacagctccgccgcgcaggcgtcataacggtcttcaatcggaccttcgccgtcagccgcacatacggcgccgcttatgtcctcagcgttcattccgccatacagcgtcacgtatctgaaagacgcttcttgtccgccgccttcatccggcggtgattcctgccactttggctgaagcaagagcggtttttcctccgtttcctcttccagaaaacgggcggtgagccccttcaatcggacacataccgcgccgttttcatcacacagctcaatatgataggcgccgtccgctgaggaaagcaccgcccacatcgtctcccggcacgcagaaaacacctgcatatcctggagggcaaacggcagaaacggccgtccggacgcggaactgtctgagagcacgagaccgatagaagcctgaagggcggcgtccagcatgctcggatgcaggatgaacggctccttttcctcgcgggcggacggcggaagagtgagcttcgcgagcacttctccgtttccggcatagacggcgtcaagcgcctgatgagacggtccgtaggtgatgccgaggctgtcgaacgcttcatagcactcagcctttgacaagtgacggccgccgcagcgcgcctgaaccgcttctacatcgagaacaggagcacgttccgtctcttcgagcacggcctttccctggaaaaagacaagcggctcttctccttcggcatacgcttcaaaagcgatgtctccgttttcttccggctgaagctttacatgaagcgtcactccttcagaaagcgccgtcaccgggtaaggtgaaaaagcgcaagaaggatgggcagccatatgccgtggtcgataatatattggatcggaactttcagtctgatcgtcctctggaaaagctagtaacggatatcacatatttgccttatgggcagaaacaattgtatctttccagtatattggatttatacaatggagaagtgattgcttttacgattggcgatagacaggacacagactttgtcttacacacacttgatcagctgcccgcactgccagagaactgtgtgttacatagtgaccaaggttctgtttatacatcttatgagtatcagaaagctgttaaaacaaaaggcattaccatgagcatgtcccgcaaagggacgcccgctgataatgcctccatcgaatcgtttcattcctcactaaagtctgaaacgttctacctcgacaggttggaaagcactacgacgaccatcgtagaacaaactgtcgaaacctatatacactattataacaacattcgtattcaaacgaaactaaacaaccagccgccggtcacataccgacagctggctgcttaaaggtgttttgatccctgtctcaaaaacgggggtcagtcccttcacgcccggctttttttctttaatttcagcaatgaaatcctcatatgttctccctctatatacaaaaaatctttaaccaactattgactcttacgttgcgtaatactttagagtagccattaaggaggcggcaaacgtgatgggtatgaaagtaaaagaagtagctgaactgattggagtgagcatacgtactctccatcattacgatcaaatcggattattgactcctcaggaaacgaccgattccggttatcggctttattctgaagagaatcttgaacagctgcagcagatactatttttcaaggagctcgatttctccttaaaagagattaaagaaatcattaatagtccttcatttaaccgaagggaggcattaattttacaaaagaaaatgttgattgagaaacggaatagagtcgataagatgattgaaaccatcgataaatcaatcaaacatttgatgggagagattagcatgacgaacaaagagcggtttgagggaatgaacttcaatcataatctttatgaacaagaagctcgcaaacggtggggtgatcaacctgtcgataaggtaaatattagattaaaaaacatgactgatggtgagcaaaaagatttatctgataagtggactgcaatgttcaataaatttgcactccttattaaccaatctcccaagtccccagacgtacaaacagctatcaaagagtggtttgattttctcaatgaaaattttggtgaatattcttttgatgccttttacggattaggtcaactctatattgaagataaacgcttcactaagaacatcgatcagtatggtgaagggttggcgaagctcatgagtgatgccattacaatttatatagatcatcaaaaaaagggtggtacccattaaaatcattatcgaggatacaatcaggcaatacgaaacgttattttcaatgattgaaaatagagaagattattatcggtattcaatgatgaaaccttttgaagatatgtggaaaaagatgaatgttcccttaaaggcaaagcaacctaacggatatgatgtaatcatggctgcaaatatgctgggctatctgagcatatttgatacggaaaccggaagaaaagcattagagaatctaaaagaaattcaagctcttcaaattgcatatggcactttaactcattgtgtagaatttatccaacaaaaccgcttaaaaataaatgctgatgaaataaggtttgggatgtatttggccaatcaaaaaaagcttgagttacatagagggtattgtggattcggaggaattccgggatttattcaagtttcaatattccccaattcatataacataccgagactgcctgctgtaatcgcacatgaatttcatcataatattcgtttttcgtatttcaattgggattatgggaacgtaacggttggtgattacttaattatagaggggttggcagaatcgtttgccaaagaactttacggagaagctttgttaggtccttgggttacttcttttgaaaaagaagacttagaatactcaaaagaaatcatcaaaggctcgttaaatatgaaaggatttgctgaggtcagcagttacatgtttggtgacacctttgcagccgaacaaggttatcagcctgtcggcttatcaccgtttgcaggttatgcggttggctaccaagcggtacaatccttcatgaaagccaacaatgtggggattagtgaggccactttacttagcacagatgagatactaagtaatagcgggttgtttctttaagatatgaagattattttatcccgtattaacgcgatggaagagggttttcttttcccctctttccacgctataaatgatcatcctattttttccgcaagaaaacaaccttcaaatagttcccttctttaaacgcgggaatcgttttgaaatcttccggaagcgtgtattcttccaaaatgtcgtaacgctcatttgtttctttaaaggcggtctctataaagcctttaaatttcttcatattgaaggcgctgctgtttgtcgaagcgacgatgatgccgttttttgcggtgatggcgatcgtttccttcagcagatttttataatctttcgccgcgctgaacgtccgtttttttgtgcgggcgaaagaaggcggatcaaggatgatgaggtcaaactccagcccttttttctccgcatagccgaagtatttgaaaacatccatgactttaatgtcatgcgcttcataatcaattccgttggcgctgaactgttcaattgtttttgcgagactgcggttggcgacatcgacgctggtcgttttctcagctccgccaagcgccgccgcaacggaaaatgcccccgtataagagaacgtattcagcacccgtctgccgtttgcatacttgtcccgaatcgctttgcgcacatgacgctggtctaagaaaatgcccgtcatcgccccgtcgtttaaatccaccgcgtatcggatgccgttttcttgaacaatgaccggaaaatctcctctttcgcctttgacaaaatcgtcgtcttccacgtattgcccggccgtatcgaatcgtttcttttcatagatcgctttataagaaagctccagtccgtcaatcgcctcaatcatgctgtccttataagcgtaaatgcctttactgtaccattgaatcagcagataaccatcataaaagtcaagcgtgacgccgccgatgccgtcgccctcaccgttgaacagccggaacgccgtcgtgtcgggcgccttaaacagatgggctctcgcttcagccgcttttttcagcttgtccagaaagaaacgtccgtcgatccgttcatctctcgcgcgtgacagcacccagccgactcctttattctgcaaaccgtaatagccttttccgataaactcacccttctcggatgtcacatcaaaaagatcgccctctgttaaatgagcagagcttccggacagagcgtctttttcaatcagggggaatccttttttcagctttccggcaaatgtatctttcactgtaagtagcttcattgtgcattcctctttcgttttgctttctcttatcgtaccataaaacatgatcaacaccgcattgtcccgaaaaattcaaaacagggggaaaaccatgacagccaaaagaatcgaccatacaggcattatggtcaaagatattgaaacatccatcgccttttatcaagacgttctcggtatgcagttaaaggatcgtatcactcatacgaacggcattattgaacttgcctttctcggctttcaggaagggccggagacagaaattgagctgatccagggctacagcagcgagcttcccgcagaaggaaaagttcaccacttcgctttattaactgaagatatcgcggcggagttcacgcatgcgaagcgtcagggcgccgtatttatcgatgaagaaatcacgacgcttccgaacgggtaccgctacttttacattgaaggacctgacggcgaatggattgaatttttccagcgttaaaaaaaacgggcgaaagcgcccgttttttttatgtttcttcagtgacgttttgttccgccgcccgttcctctctccatttttgaagatcccaaattcggaaaaacggataatagatgataaatgtaatcaggagattgatcagctgcatgaccgaaccggagattttcccgcccgtcgccaaataaccggaaatcagcggcggcatcgtccacggcacggcgattcccgccggttttgccaccatccccgtgctcatcccgatgtacgtcgccgtaatggtcaagagcggcgcaatgataaaaggcacgattaacagcggattcatgacgagcggcatcccgaaaataatcggttcgttaatgttaaaaatcgcgggcccgattccgagacggccgagctgtttcatctgtttgcttctggagcgcacaagcatggtcagcacaagggcaagcgtcgctccgcttccgccgacattaatccatatttgaaagaactgtgtcgtaaaaatgctcggcagcgcttctcccgcctgaaaagccaaacggttggcgtccatcgccccgtaccagatcggcgacatgacgccgccgataatggacgcgccgtgtatgccgcacgaccaaagcagcatttgcacgaattcggcgataagactcccgccgagactcccgcccaaaatagacagcggggtgcccagcagatcgcctacgacattgtggaggcttttaaaaggagttatttcaataaacagacgggccagccatacaagcgtaataataatgaaaccggggatgagcgcaacgaacgatttgctgaccgcaggcggcactccgtcaggcattttaatgacgatatttctttgtatgataaaccggtacacttccgtagacagcattgcaatgatcatcgcgacaaacagacctttgcttccgagcagcgaaatcggaatgccgcctcccaccataatctctgttgccgagccgtcaggaataaacggaatctgatacggcgtcgccaataaaaaggcggcaagggcaatggctcccgacgacagggcatccacctcatagctttccgcaagccggtaggcaatcccaaaggcggcgacaagcgccataatgtcaaaggacgcattcacgggatacccgagcttttcaacccaattttcaccgaaaagaccagccataaaatcggcataaccgggaatcggaagactcgtcagaatcagaaaaaccgatccgatgatgataagcggcatagtcaaaataatgccgtcccgcaaagctcttaagtgcctttggccggcgacttttccggcgacaggcatgattttttcttccatgacccgattgaacgtactcatttatcaaaaaccccctttttgagttcattgcgcagatgtcttaaagcattttctccatcatattttggaaacgcttacatttgcatacagaaattttccttatccctcaggaaaaaaagaattccgcactgccgatatataaagaaaaagggggaatcacaatgtatcacaccctgaaaccgataatggccgcggccttgtgcgtcggcctgttctccgccgcggcgcccgcgcacgccgagacgcacgaccgggacgttatcgtggtgtacaaaaatcaaaacggcaaggaatccgccatagacagcggagcggatgtggaacagacctatcagcatctcccggcagtcgccatgtcagccgattcacaaacggtgaaagacctgaaacaggaccctgacatcttatatgtagaagacaatgtatcctttcaggcagcaggcggttctgatatccgcccgttatcagcggcccaaagcagcagttacgcgctgccgcaatgggatatagaaccgactcaggtcaagcaggcgtggaaagaaggcttgacgggaaaaaaggtgaaagtggctgtcattgacagcggcatttatcctcatgatgatctgtccattgcgggaggctattccgcagtcagctatacttcctcatacaaagatgacaacggacacgggacgcatgtcgccggaatcattgcggccaaacatgacggatacggcattgacggcatcgcgccggatgtccggttatatgcggttaaggcattagacagaaagggtgcaggggatcttaagagccttcttaaagcaatcgactggtcgatcgccaataaaatggacatcatcaatatgagcctcggaactaacgcagacagcaaaattcttcacgacgccgtagataaagcatacaaaaaaggaatcgtgatcgtagccgccgcaggaaacgacggcaacaaaaaacccgtcaattatccgggtgcctacagcagcgtaacagcagtctcagcgtcaactgaaaaaaacgggctcgcggctttttccacgaccggaaaacaacttgaatttgccgcacccggcaccaatattacgagcacgtacctgaatcaaatgtacgccgtagctgacggcacatctcaagccgcaccgcacgtcaccggcatgttcgcgctgctcaggcagaaatatcccgaggaaacaaatacacagctccggcagcagatgcagcaaaacatcaaagatctgggcgctcccggacgtgacagccgattcgggtacggcctggtgcaatatcatgtaaagcaaaagagctatgccgaacgggccgtaataaaagcggaaaagacgaaaaaacaggcagatatcaatcaagcaaaaacggccgtcagcaagctgtccaagtcaaagggaaaaaccgctctcgagtcccggatcaataaagttcagacggcaagaaatgtgacggacgcaagagacaaagtccggactgccgaaaaacaaaagaaaaaaaccgccgtcaatgccgcacaaagcgccattcgcaaattaccggccggttcagaaaaaaaagggctgcaaaagcggctgaacgctgtcaactcaagccttttgaaaacagctgaggccagcgtcaagcaggcggaaaaaaagacctctgaggccagcaccgtaaaagcccaaaaagcagtcagcgaaatccagccgggaaaagaaaaaaacgctctggaaaaacggcttgaccggataaaagataaactcaaccggcagcaggctagagacaaagtaaaaacggctgagaaaaccaagacgaaaaaagcaaaatcagcggcgcaaacggcagtcagccgattgaagccgtctgccgaaaaaaccagcctgcaaaaacgcgtgcgtgcgattcgggtgaaatagcaaaaaaaacgcttatgagccggataacggcttcacaagcgttttcatcacacctgcctattggttcatggccgggcggtcgatcgtgttccatttcgtaaaggacatatatcggaaataatgatcacgatacgggtgcgaggtgcctgtattccaaggcttgtcactgccgcagaaatggacgatggccggttcggcacgtgtttctctgtaacgtatacggtcgatcagttcaggaggcgttttctcgttcatgataatatgcgtctgcgcgttccagcgcggatgcagttcatgccattgatcatataagatcgcgttaagcgcgtcctgatcatgaaacacgagaaaatcctccgagctgttttcgttgataaaatcaatcaccttttcggaaatattttgttttctccaaggttcgaaatctataatcataatgccggaattaaaatacttggcagtttcgctgatattcatttttttcagtctttcatgctgtccggcgtcttctaccgccgcaactattgccggggaaatatccaagtcccataaaaccgaaatatcttccatcacaattgcatcgcaatcaatgtaaatcatccgctttacggactcatccttaattaaatcagggatggaaatgcggtaataagccgcttttgtaatgtggctgctttcgactgcatgcttgtattgatcagcgtctacttctaaaaattcaagcggcgtcccgaatgacatcgcggtctgttcaagcttgtccttgttttcggcagtaattccgccgtcgattacatataattttgcatcccttgttttatccatattcatcaataaagaagcgaacatcccacccaaatgacgagcataatgatcatcggcacatgatacgatatgcattgtttcattctttcccactgatattcatctccctttttgttgtacaaatgtctttccctttttttaaaaagtaaacctcgatcttacacattttttctgcgggaatgtgctgtttgcgatttgatatcttttgcattccctgttcaaattcaatcaggatttcagcctgaatcatcgtcagaatatatcgcgcaggaaagcgaaaacacgtaaacataaaaacaaccagccggactgcacataaaagcggtccggctggttgtgatgcgtcaatcgtttaatcgacttctttcttaatcccaagcatcttttcgtctaaataatgggcgatgtccgccgcttccttcagctcgtcggtcagatgctttgggacttcgttatttaatttgtaataaattttatgttcaagactcgcccaaaaatccatggcaatggtgcggatttgaatttccgccttcacatattccacacgattcgtcaaataaacgggaatttcaataatcaaatgcaggctgcggtagccgttcggcttcggatgtttgatataatccttcacctttacgatcttcaggtccttatgctgcttcaaaacctcagcgacattataaatatcggaaataaaggaacagataatcctgacacccgcaatatcatgaatatgctctttcatttcctgcgtcgtcacatcgcagcctttgcgcatcagtttattgacgatactctcaaaacttttcacgcgtgattttgtatgctcgatcgggttatgcccgtgaatcagattatattcctggctgataatagaaaacttcgtatccagctcatctaaagcgaatttataaactaataattcatttttccaatcttccatgaccgttttcaaatcatccatatgggctgttgacaagtccatttttttcatctccttgctttgctgtccatatatgagacgggtcagtccgcggtcaggttctttacaaaatcgtgaagattatgtcataaaaaaaagcaaatgccggttatggcatttgccctttcatttgatcagcggaaataactgatcaggagtccgatggaaagcaggaatccgaaaaatgtattggtttgcgccgttgatttcatcgcaataatcatgttcatcggcatttcgtttttcacaaagcctttcacggcctgaacgggtttcggcacgctcaggaagaccaggaacagccacgggcttgtgtaacccataatgacaagaccgacgatccagatgtaagcgatggcaaaagatgcggccagtatcatgacggcccctctatgccccatcaaaatggccagggttttacgtccgccctttttatcttcctcaatatcacggatattgttggacagattaatggctccgaccaagatggcgatcgggatggaaatcaaaatgctctgttcattaattctgcctgtctgaatgaagaaagaaataaggacaaatacagagcccatgcaaatgccggagaacagttccccgaacggtgtatacgcaatcggcagcgggccgcccgtatacagatagccgatcagcatgccggcaaggccgatagccgcaagccaccagctgctgctcatgcagatataaacaccgagcacgagggcaatcgcataagagccgagcgccagctgcagaattgttttcggcttcatgccgtggcggacgatcgctccgccgataccgacggaatcctccgtatctaaaccgcgtttaaaatcgtaatattcattgaataagttcgtggcgatctgaatccaaagacaggaaaacagcatggccaaaaacagcaggaaatcaacctttacgtaaaacatcgccaatacggtgccgagaagtacgggcacaaacgatgccgtcaatgtatgagggcgggttagctgccacaaaatgcggcccatgctttctttctcgggcgtcttttggctgccccccatattgttttgattcattttcctcttcctttctattaaaaggctttcacagtcagccgataacagtagtgttgaattggggttttcacgttttctgctaccttatctatcataataatttcttcctcatttcacaagatgcggcgctttatcggctatcctgccggaaacggcttttcgcccttctccattggggttcggcacaagcctgcttaagaaaaagccgccaaaatttttttacctcgtttatatttacgataagttaaaaatcccgcctgaacagcgcccttttagtatgatcatttgccaatttatacatgcgtgttttccatccttttgtttctcattcatttttaaggaaattttaagcttaggatattagacatattttgaaactttttgttaatctaatcgtcatatactggtgtaattattgaatacgcggggaaggaattttgaatatgatgcaaaaattaaaacgtgcttatgaaaatacattgatcaaatggacgtttcatacgggcttttattttctgatattagtattgctcttttggatgtatggatttcatacagcgaataccggcacttatatttacaacgatttctaatcggggaggataactatgaaactacttgatgctataaaaacatacgcagacgccaagccgcaggccgaagcgtttcgttccttagatcattccctcacttacggggaattatgggatttgtcggagcgggttgcgtccggcattcaaaaacatacagctgacggttcgaaagcgcctgtcctggtttacggacatatggagccgaatatgatcgtttctttcttaggaagcgtcaaagcgggccgcccttacatccctgtcgatgtttccattccggcggagcggatcgtcaaaatcattgaaagctcaggcgcagagctgcttatcagcgtatcgggcgatgcagtcgatacgggaagcaatctgattaaaaccgttacgcccgaagagcttgcagctgacggagatgcagacctcagccgtgagaactgggtaaaagagctggacacgttttacattatttacacgtccggcagcacgggaaatccgaagggcgtgcagatatcggctgataacctgcaaagcttcactgactggatctgcagggattttcctgtgggcgagggtaagacattcttaaaccaagctccgttttcttttgatttatctgtcatggacattttcccgtcgcttcaaacgggaggtacgctgcactgcgtaacgaaagacaaaatcaataaaccgaaagtactatttgaagagctggagaaatccaaactgaacgtctggacatcgacgccgtctttcgtccaaatgtgtctgatggaccccggctttacgcaggagctcctgcctgaggcagaagtatttatgttttgcggagaagcgcttccggctgccgtggcacaggagctgttaaaccgttttccgaaggcccgcgtattcaatacatacggcccgactgaaacaacggttgccgtcacctccgttgaaattacgcagcagatcattgatgaaaatgaatctctgcctgtcggttttgcaaaacccgatatggatatcttcatcatggatgaaaacgggaataagcttccggacggtgaaaaaggggaaatcatcatcgcgggcccgagcgtaagcaaaggctatctcggagaaccttctctgacggaaaaagcgtttttcccgatcgacggccagtgggcatatcacacgggtgatgccggttatgttcaggatggtcagattttctgccaaggacgccttgatttccagattaagcttcacggctaccgcatggagctggaggaaatcgaagtacatgtaaggcagtctcaatatgtgcgcacggcggttgtcatcccgtatcagcctaacggacctgtcgaatatttaattgccgccatcgtgcctgaaaaacatgattttgaaaaagaattccagctgacaagcgccattaagaaagaactggccgcttcgcttccggcctacatgattccgagaaaattcatttatcaggaccacattcaaatgactgcgaacggaaaaatcgaccgtaaacgcattggcgaagaggttcttgtatgacgccttacagctcgtttttcttctttatcttacttggaatccttcttttgccgacgattattttagggctgaacggcaagagattccaaggatacaacatgtttatatccatcatcgtattggctttgattttcgcgcatgatctgcacggcgtgatcgcactatgtatctttacgctgtggcaggtgcttttaatcaggggttatctcgcttacagactgaaagccaacagcggctttgtcttcagtatggccgtgatcgcgtccattttacccctgtttttatctaaattatggccgtttttctttccgccggcgcctcatcacccggttcataacctgatcagtttcttaggaatttcttatttgacatttaaaggcgtccagctgatcatggaaacgagagacgggctgattaaagaaaaaatgccgcttcaccgccttttgtactttattatgtttttcccgaccatttcttccggtccgatcgacagataccgcagatttgccaaggacgaacagaaagtatggacaaagggagaatacgctgatttactgtataccggcattcataaaatttttatcggtttcttatacaaattcattatcggatatgcgattaacacgtatttcattatgaatctgtctcatatcacccacagcaaactgtggggtaatgtgctgtacatgtacggatacagcttgtacctgttttttgattttgcgggttacacgatgtttgccgtcggtgtaagctatatcatgggtatcaaatctccggaaaactttaataagccgtttatcagcaaaaacattaaagacttctggaaccgctggcacatgtccttatccttctggttcagagactacgtatttatgcgctttgttttctggatgacaaagaaaaaatggataaagaaccggatggccgtctcaaacatcgggtatttcctgctgttcatgctgatgggcgtctggcacggactcgccctgcaatatattgtatacggcctgtaccacgccgtattaatgaccgggtataacttttttgagaaatggaataagaaatacaagtggctgcccgccaatcgttttacggcctttttagccatcgtcatcacattccatttcgtatgtttcggattttatattttctcaggaaaaccatttcatcactaaaggagattgaaaacacatggaatttaaacaggaagtattagacgtattagctgaagtttgtcaggaggacgctgtgaaagaaaatcctgatattgaaatctttgaagaaggactgcttgattctttcggaactgtagagctgctggtcgccatcgaaaaccgcttcggcattacagtgccgatcactgaatttgaccgtgacgagtggaatacgccaaacaacattgtaaacaaactgactgagttgaagtaaatgaaaaagcgtttctttggaccaattattttagcgttcgtcctgtttgtcggagctatcgcagttccggcttcatggcttacgcgcttcattcctgaaaaacgtgtcgaagagtcggcggcagccttaaatccgaatatgttccagggactctatcttcaaaacaaaatgttcgaagactcgaagtatatgccgattttcggttcttccgagctttcaagactggatgagtttcacccgtccaactatttccaagtgaacaaccaaggctttacgccttatcttgtcggaaaaggcggggaccaatccttgatacacgccgtgaactttgcggcgcattatcagcagctgaagggcaaaaaactggtattcattgtttctccgcaatggtttatcaaaaaaggttctgatgaacagcactttgcgccgaatttttcatcacttcaggcattggatttagcatttaataaccagattgatcccgcggtcaaaaagaacatgatgaagcgcatgctccgttttaaagtcgttcagcatgatgccgtcctttctgaattgtacaagggaatggtcaacggacaatcatggaaagtgaaagcggtcatgccggctgccaaagcttattattctctgcttgagaaaaaagatctttattattcaatgggagaaaacaagggccctgaacggacgatctctgaaaacctgaaagggaaatcgtggtcagagttaaaaacagccgccgctcaattaggagaacggagctccaagtccaatcctttctatatcgatgacgcttcttataaaaagattaagaagaaagtaaagagagtgaaaggaatcaacaaaggaagaacatacgccaaatcagtcgaatatcacgactttgaggatatgctggacattctgaaagatgcaggcgctgaaccgatgttcgtggttattccggtcaacggaaaatggtatgactacaccggcttcccgaaaaaaggccggactgattactacaaaaaagtcactaagcaaattaaagcgaagggctttcaggttgccgacttatccgggcacgaatatgatccgtactttatgaaagacaccatccatatcgcctggaagggctgggtgtacgtcgataaagcaatggagcagttttacaaaaccggcaaggtgacggttcactgagcacggtgatgacagaatacgtaaaaacgaacacgcagggggcattctctcccctgctttttatgtgattttgattttttcacaaatttgaggaaaactattgcgaatatttgttgaaggtatacaatagaatataaattattttcaaataagtttgacaataacaccaatagggagacagaacattatgaaacaagatattcgtgttgaattcacttcagccaaaaaaccgaaaccggacccccatgaccttgcgttcggcagaattttcaccgaccatatgtttgttatggattacgacgccgatcaaggctggtatgatccgagaattatcccttatcagtccatctcaatggatcctgcggccatggtttatcattacggccaaaccgtttttgaagggcttaaagcgtatgtaacgaaggatcaggaagtgcttctgttcagaccggagaaaaatatggagcgcctgaaccagtcaaatgaccgcctttgcatcccgctcattgatgaagagcttgttcttgaaggcctgaaacagctcgtagccatcgacaaagactggattccgaaagcggaaggcacttccctttatatccgtccgtttatcattgcgactgagcctttcctcggtgtagcggcatcccatacgtacaagctgtttatcattctttccccggtcggctcttattacaaagaaggcattaaaccggtaaaaatcgccgtggaaaacgaattcgtgcgcgccgtcaaaggcggcaccggaaacgcgaaaaccgccggcaactacgcatcaagcctgaaagcgcagcaggttgcggaagagaagggattttcccaggttttatggcttgacggcattgagaaaaaatacatcgaagaagtcggcagcatgaacatcttcttcaagatcagcggcgagatcgtgacgccggagctgaacggaagcattcttgaaggaattacgagaaattccgtcatcacccttctcaaacattggggactgactgtgtctgagcggaagatttcgatcgatgaaatcatccaggcgcatcgtgacggccgattggaagaaacattcggaaccggtacggctgcggtcatttctccggtcggcgaactgatctggaatgatgaaagtcttgtcatcggcagcggtgaaaccggagagatctcgaagaaattgtatgataccattacaggcattcaaaaaggcgcggaagccgacgtgttcggctggacgacggaagtcgcctcactaagcgaatcaaaataagcaaaaaacccggaagcgaatccgggttttttttactgctcttatgcttcaatcgacttaaagaaatgaggcagatgatctttgtgggcctcaagcatttcatccagaatggcctttgccacggagtctgacgggacgagaggattgatcgtcatcgcaagtagcgccgtttgataatctcccgtgacggctgcttcagcggcgacacgctcaaatgatttgatttgctggacgagtccgcggacagacaccggcagatcaccgacggcgatcggtttcggaccgtctttcgtcataacacagttcacttcgaccgctgagtcattcggaatgctggcgatcgcgccgttgttgatcgtattgacgggctggatatcatgtttgtcgttatagatggagctgatcaggttgcaggccgcgtcactgtagtacgctccgccccgtttttcaagctgcggcggtttaatggcgagattcggatctttgtacagttcgaacagttctttctcaaccttctgtacgacctcggcgcgtgtgccctccgtctgtgacgcttctatttcatgctcgagcatttctttcgttttgaaataatagcggtggtagccgcaaggaatcagatcgagcgccttcaggaattcaggctcccattccgcccctgaaatatttttcatcgtcatggcgtttttcgggtctcccatggcttcaatgacttgatctttcacgctgacgccgtctaagaaaacatctaatccgaagaccatatgattcagcccggcaaattgcacttcgatccggctgacatccacgtccaatgcttttgcgacgcccattttaatgccgatcggcacattgcagaggccgacgacttttgtgagattcgagtagcggagcaaggcctcggtaaccatgccggcagggtttgtgaaattcacgagccatgcattcggacaaagctcttcgatgtctttcgcgatttccagaataatcgggatggtgcgcagccctttgaataaaccgcccggaccgtttgtctcctggccgattacaccgtattttagcggaatccgttcgtctttggcgcgggcctcaagaaggccgacgcggaattgagtcgttacgaaatccgcatccttcaaagcttctctccggtcaagcgtcaggtgaatctctatcggaacacccgctttttcgaccatgcgttttgcaagcgtgccgacgatattgagttttttctcgccttcgggaatgtcgacgagccataattctctgacaggcagttcctcatagcgtttaatgatgccttccacaagctccggtgtatagcttgaacctccgccgatcgttacaattttaattccttttgtcatattttcgctcccccttgcagactcactttttcgtaaatctcgactaactcagcggccaagtctttcacggtcatggcattcattaaatgatcttgcgcatgcaccattaaaagcgtcatgtctgttttttctccgccggcttcattttggatcagttctgtctgataatgatgggcttccgtcagttcccttgcggcttcctgaagcttttcttccgccatggctctgtcccccctctttgcggcggcaatggcttccattgatgcgcttctgccgttgccgccatgcaggatgatctgaaaaatggtctgttccattttttcattcatgtgtttcactccctttctctacagcacggctttttcgtctccctgtacggctggcgcctgcgattgttcaagttcgttttcttctttcagcttttgcgaatcccacattctgaagaacggatagtacacgataaaggctgtgatgatattaatcgcctgcatgacagcccctgatatttttccgcccgtggcaagatagccggagaaaatcggcggcatcgtccatgggacggcaatgccggcaggtttggcgacgaggccagtgctcatgccgatataggtaaggaccagtgtgacaagcggtgtgataatgaacggaatgagaagcatcgggttcatgacgatcggcattccgaaaataatcggctcattaatattaaagacggccggcccgatggcgagtttcccaagctgcttcatctgcttgcttcgcgaacggagaaacatggtgaccacgagcgccagtgtcgcgccgcttccgccgatgttgatccagatttcaaaaaactgctgggtgaaaatattcggaagcgcatcgcccgcctgaaacgcaatccggttggcatccatcgctccgaaccagatcggcgccatgacgccgccgactatgttcgccccgtgtaatccgcacgcccacaagagcatttgaaccgcttcggctatcaggcttccgccgagacttcccccaagaatcgagagcggtgtccccagtacaacgcttacaatgttatgaaggctttcaaacggtgtcgcttcgacaattaaacgcgcgccccagatcagaaagatgacggcaaaaccgggaattaaagcgataaacgatttgctgaccgcaggaggcacgccgtccggcattttgaagacgaaattccgctggatgatcaggcggtaaatttccgtcgacagcatggcgatgatcatcgcgacaaacagccctttgcttcccatgagagacagcgggatgccgccgccgaccatgatttcctctttggcgccggaaggcagaaacggaactttgtacggcgttgccaagagaaacgccgccaaagatatcgcaccggccgataatgcatccaccccgtatttttcggccaggcggtaggcgattccgaaagcggcgacaagacccatgatttcaaaggtcgcatcaaccggatattgcagtttttgagaccaggcgcttccgaacgtctttgccatgaaatccgcatatcccggaatcggcaggttgccgatgatcagaaaaaatgaaccgatgataataagcggcatggtgaggatgatcccgtcacgcaatgcttgcagatgccgctgggaggcaatttttccggcaatgggcatgactttctcttctaaaaactggttcaccttattcacacggcccgcccctttctacgatgcgtttccgagctgttccgctgatttcagaacctccgctccgttgcatgtgccgtaatggacagtattgatgacttcaaccggcactccttttgattcacccaattttttcagctgcggaagcaaataacggacttgaggcccaagcagcaatacgtccgctttatcaatatgctggttgactgaatcgcctgacaccgcccagattttatattcttttccttgttcctgcgcgcttttttccatcttggtgacgagtaagcttgttgacatccctgctgcacaaacgagtaatatattcatgtaaaagacctcctgaaagtttgatattttgtatgtctcgatgttagtaccatcatattatgaaatcgctttcataactactcaggctttttccgctgttaacggaaaaaaggtgtatcccggtctttctctgatcgtttgtctctgaatactcgtaaaacctcctgataggttgtgcattttaagagacggcttaccgcggccggatcatctaacatgccgccgagccatttgtacatatgctggaggtcggctttgctttctttctcgacgcagagcaggcagacaaattggacacgcttatccgcccagtcaatcggcttcttcagcgtgcataccgcccaaaacgtcgtgtctgtctgcggaacgagcgggtgcggaatcgccgtaagattgccgaaactcgtaggagaaatcgcttccctttcaaaaatagaatcggtcagagaatcagaagcgaggccggctgctgcaacctgctgtccgagaaaacggatgacgtcctccttcgtctccagatcctgctgcaaaaataccagctccggtttcagaaagttcaattgttcccgcttttcttccagcatggcgtcgatttttgtaaaatccccgccgcccaacagcgtatgaacctttaatacgggaacgggcaggtcttttttgatcggcactgtgctgaccacaaaatcaatcgactcaaaggaaagctggtcaaggctgcagtaatcagccgttccgacgatttcaagacgctttgcgaaccgggaacggagcttttctcttaaaagctgtgcgctgccggcgccggacgcacagacaatcaagcagcgtttaggcggccgttccgtctttctcctttcaatggcggctccgaaatgaagcgccaaatatccgatctcattctcatgaatatcaatgccggtttgctccttgatcacgattcccgcaatcactcccgcttcaaatgcgagcggataattttcctttatggcggagagcatcgggtttctcaggttcattccgtaccggtttcggttaatcgccggcttgatgtggagcgcaagacccgctttcagctcattgtcgtccgtgattccgagcttcagctcccgctcaatggcttcgatcatggcctccgtcaaacggctggtttccccgtctatcagccttgtaagctcttttccttccagttgtgactgggtcatgcgctttgtcccgagcaggtgaatggcgatataggcggtttcctgttcgggaaaggtgaccgaaagcgccgattcaagctcttttacgatggcttccgctgactgatattctgtttcaagcttaatatcatgaagatcttccggaatgagagatacatagttttctgtccggatacgtttgcaggcaatggcgatatggatgatgagattgttcaggccgaagaaagaaagcgggatcttatggtttcgaacctgcttcataatggctgtgcggatcacatgaatgtcgtctttcggcagaataccggccttttcactcaggagatcaggctcaggctcgcggtcgtccactaagtattccgccatacaataacggaggcggagctcttcgccgcgcagcttaaagccgtagttcggccttgtttccaaaatgatgtcataggggcggagccgttttttgacttcttttaaatcagattgaagtgtggatttactgatgaacagttcttccgccaagtcatccagcttgaggtagccgtcggccagaagcattcttttcataaggtaatctatccgttcatcgggaaaaatcggcacggtgctgttctgctggaaattgtcctgaagccagtttttaaacggctgctcattccggatcagcagcttatagccgctccctctgacagattgaatggatgcgccgtgtttttctacaatggtttgcagttcctttatgtcattgcggaccgtccgcgtcgttacctttacatttgcagcgatgactgagcttgtaaccggtgtttcagcagctaaaagcaagcgcagaagttcacgaagccgcccatgaagcatgagaaaaacctcctatcagatcagatgcagacgtgaaaaatgggcaaaaagaatgaggaaggggtaaatgtatgtaaattctataatggggaggatttcaagtcaatgcggcaatccgatgccaagcccgtaaaaaaacagccggatcagccggctgttcgggatgcggacatgcggttccgcttagatgccttccgttcttttatgatttttctgatgatcggatagatgacgggcgcccatttgataatcgttttgaaaaattttttcaatgtctgaatcccctttcttttaccttgtctttcccctgttatcagcgtttataaacatggtcagcgtgagacataccggttccccgtcacccaatagcgccacggataatcccgggcttctccgctgttgtcaatcccgattctcgggcctgttgatatatgctcaggcgtaaagccctccgtaatatacagcggcggttccgtgatcatgccgccgtagtcgttcattgaaatgcccatcgccttcgtcagttttcccgggccgtttgtccactctctcggaggtctgcccggtctcctgctctccatcaggaactgtccttcatgaggctccgccgccctgattaacacggcctgcggaatgccgatgtccgcggcgacgacgttcattaatgtatgagtgtgcatgacgtatgtataaatgcggcccgcctcatggaacataatttccgtccgtttcgtgcgccggttgccgaagctgtgcgccgcccggtcttccgctcccatataagcttccgtttccacgataaaacctgaagccgttccctcatccgtctccttcaccaagagacagccgagcaataaaggggcaagctccactgacggtctctggtaaaattcaatcggcaaaggctttcgttctcccgccatttgcctccctcctttctaatatagcgatttcctctttcacgtttttcacttcttttttacaatataaacatgagagaaaaaaaggacattattgttgaacgctctattgcgttttgaaaatcggctcggtataatatgatggttcaaatgaaaatgattctcatgttcaataaataccggacaatgatcataaaagtaggtgaattgatttttgagcgattctgtcaggtccgcaaaccgtctgatcagcatcttaaaaaacggggttttcttcctgatcgcggtgatcgggctgcttgtatctatttttttcgccgtctcattcggcgcgaaagacattactttacatacggtttggtcggctgttgctgattacaatccgaatataacgggccagcagatcattcatgaattgcgtcttccgagggtgctcggggcggccgttacaggagccgcttttgccgcagccggcgccctcatgcagggtgtcacgagaaacccgcttgccgattcgggagtcttaggcgtaaacgcgggcgccatgtttgttgttgcgctcagttttgcttttttccctcatttatcatacgccctgctgatggtgatgtcatttttgggagcactggcaagcaccggcttgattttctttatcagtgcggcgggaaaaggcagcatgacacctttaaaagtgacgcttgccggggcggtcgtggccgctcttttacattcactcagtaccggtgtggcgatttattacgatttaagccaggatttggccttctggtacgccggcggggtgtcagggatcaagtggactcatttacaagtccttgttcccgtgattgcggtcttcatcattcttgcgacattcatgggccggtccgtcacccttctctcaatgggaaatgacgtggcggcgaatttaggggtgaacacggctctgacgcgtgccgccggattaatgatcgccgtcgttcttgccggtgtgtctgtttccgctgccggcgcgatcggctttgtcgggctggttattccccatatcgcgcgaaagatcgtcggcgttacgtacaggctgattattccgatgtccgcgttactcggcgcgattctattgattttggctgacctggcctcgcgcacggtcagtcccccgagggaattggcgataggcattatggtcgcacttgtcggtgtccctttctttctttatattgcccgcaaggaagggagagacttataaatgaaagtgcagaaagaaacaaaaaaagcggcggcggcaggactcattctgctggtcatcgccgtttgcattattctgatcgggctgcatacgggctcattccggctttctcctctcacggtgggaaaaacgctgttcggatacggcacgtttcaaagcacaaccgttttattcgattaccggcttccccggattctggtgacgatgctggccggcatcggtttaggagtgtcgggcgctattttgcagggtgtatcccgaaatccgcttgccgatccgggcattctcggactgcatgccggcgcttccttcggtttgatgatgtatatcacgttctttcattccctggaggcgcaggcatcgatgttcatcccgctgtttacgtttgcgggcggaacactcgccgccctgctgatcgtagtgcttacgtacgacaggctgaacggttttttaacgatccgcatgctgttagtcgggatcgccgtttccgcgggcttcagcgccgttacattgtttatgtcgctgcgactgaatgaagaaacttatacattcgcttcccgctggctggtgggaaacgtctggggcagggattggattcacgtgtggtcgctattgccctggatcggcattctcgcaccgcttgcatggcttaacgcccgctctttgaatattttaatgctcggtgaccaggcagccgcggggctcggcgcacacgtgcagagaaaaaggatcatgctgatcgccatagcggtcggcttgtcctgcgcgagcgtcgcgatggccgggggaatcggctttatcggctttgccgcccctcacttggcaagacggctcgtcggcaccatgcatcagcatattatcccgattgcgggattaatcggactcgtcattcttgtcgcggcagacaccatcggccggtctttgtttcagccgaacgccattccggccggcgtggttgcggcagccatcggcgcgccgtattttctctatctcgtcatgaaaatcaaatcataaaacaaggagtattcccatgaaaaaaataattgcgctcgtcagtttcatgtgtattttcttattggctgcctgccaatctgattcaacacagccggagtcaaaaaagaaatccggcgatcataaaatcgcttcgatgtccattcacctgacaaatgatctgctggctctcggcgttacacctgccggttccgtcgtgggcggagaattaaaagattttctccctcatgtgaaaaatcagctgaaagacacgaaaaaactcggacctgcctcagacccggatatggaagctttacttgagttgaatccagacaacatttatcttgataaagaatttgcgggaaaagatgtgtcaaaatacaagaaaatcggaaacacacacgttttcgaccttgataaaggcacttggcgcgatcatttaaaagacatcggaaaaatcgtcaatcgtgaaaaagaagcgaaaacatttattcaagattacgaagatgaaacaaaacaagtcagatccatgatgaataaggaattagggaaaaacgccaaagtcatggcgatccgcgtgaacgcaaaagagcttcgcgtcttcagcacacgccgtccgatgggaccgattctgtttgacgatctgaagctgaaaccggctgacggcattaaagaaatgaacacctcccgcccttatgaagtcatttctcaagaagtgctgcctgattacaacgcagatgcgattttcgtcgtcgttaacagagacgacaagtcacagcaagcctataaagaattgcaaaaaagcgctgtatggaaagggctgaaggccgtgaaagcaaaccacgtctataaaattgccgatcagccttggcttgattattcagcactgggaaataaattagcaatggatgaagcgaaaaaactgttccaaaaataaacatgagccggttttgcaaaaagtgcaaggccggcttttttatattgtcgtttacttatataaacatctgcttatataatagtgtaaaaaaggagtgagcgcatggaacggaggcatcatgctttaagttccgaagggatcagccagtgcctcaaacttctaagcgacccgacgaggcttttgatgctgaagcttctgaaggataaggaatattgtgtctgcgagctgacagctatttttcatataagtcagcccggcatcagccagcacttgcggaagttaaagaacgccggccttgtgcgggaaagacgcgagggtcagtggcggtactatgccattcatccgtccggtccggaatacgcgctggtttgctcgattctgcagcagatagatgaaaaggacgaagttttacagacattgcggcaaaaagaagtcactgttacatgccggtaagggggatatatcttgggagttgcggttttatcagcgctgatttttgtgctgacacttgtgtttgtcatatggcagccgaaacatgtatcaatcggctggtctgcctgcggcggggcggtcctcgctttgatcgccggagcagtcagcctgcacgatatcgcggaagtgacgggaatcgtctggaatgcgacacttgcctttatcgccattattatcatttcattgattcttgacagtatcggtttttttgagtgggccgcgctgcatatggccatggcggccaagggcagcgggctgcggatgtttctctatgtgtcggtcttaggggctgttgtctccgccctatttgccaatgacggagcggcgctcattttgaccccgatcgtactggcgatggtgcgggctttgaatttacctgaaaagctggtttttccttttattatcgccggaggattcatcgccgacaccacctcgcttccgctcgttgtaagcaatttggtcaatattgtatccgccgattactttcatatcggatacattgaatatgcatcacgcatgctggtgcccaaccttttttctctggcggcaagcattttggtgctgtatctctatttcagaaaaaacattccgaaacggtatgacaccggtcttgtgaaacatccggcatccgcgattaaggatgaacgccttttccggttatcgtgggctgtgctggccgttttattgatcggatatttcgtcagcgaactgctatcgatacccgtttccttcgttgccggctccatcgcggtcatttttctcattctggcgcagcgaagccccgccgtccctgcgaaacaagtcatcaaggacgccccgtgggccatcgtgtttttttctgtcggcatgtatgttgtcgtgtacggcttgcggaatgccggactgacggatcttctttctcagcttatacagaaagcggcggatcacggtttgtttgcgggcacactcggaatggggtttatcgcggcgatcctctcctccgttatgaataacctgccgacggtgatgattgacgccatagccatcagcggaacggaaactcacgggctgatgagagaagcattgatttacgcgaatgttatcggttcggacctcgggccgaaaattacgccgatcgggtcgctggcgacgttgttatggctccacgttctgagccggaaaaacgtgaaaatttcctggggaatgtatttcaagacaggtctgatattaaccattccgacgttattcatcaccctgatcggactttatttatggctgttatggctcgcttgagatgaaaaaccttttaagttgaatcttaaaaggtttttttgtgtcaaaaatccgaaaagtaaaacttttatattttaaaagtatagacatttaatttcaaaagattataatattcatgaaaacgttttaactttatgaaagaagggattcctcatgaaaagaattttattagcctgcagctcaggcatgtccaccagccttcttgttacgaaaatgcagaattacgcccgctccatcggtgaggaagccgagatttgggcagtcggacaggataaagcaaaagaagcgatgaaagacgcagacgtcgtactgatcggcccgcagatgagttttttaaaaggtgagcttcaaaaagatgcggacccgcttcacatcaccgttgatgtgattgacatgatggcttacggcatgggagacggcaaaaaagcatacgaacaggccgttgccttgatagagaacaaataaaggaggcgataagcatggaaacgtacacggatgaacagataagttttcagctgattcttcacagcggcaatgcccgcagcaatattattcaatcgatacgcgcatataaagacggccggacagatgagtcagacacctttctgacaaaggctgaagaagaactggggaaagcgcacgacatccattttcagatgattcaaaaagaagccggcggcgccaagacggatgtctctctgctttttatgcatgctgaagatcacttaatgtcagcgctttcaatgaaagagctcgtcaaagaaatgctcgacttatttcaatcaaagaatttataaaaagccgggggtgaagacgtgtttgagaaaatcagccaattccttgttccgatcgcgggaaaattaaacaataaccgctacttgcaagtcttacgggatgcttttatgctggcgtttccgctgaccattttcggttcggtgttcgtcgtgctgacgaacctgccgtttttaaacaaaatcatgagcagctccgccctgtctgtctttcaatccggatttggcggcgcttcgacggcgacgatggggattatgtccatttttgtcgtcttcgggatcggctattacctttccaaaagctacgaagtggaggccgtattcggcggggcgatcgcattggtttcttttctgctgctcaccccgttcgttttagagccggaaacgggcaaagcggtcgcaggcgtcattccggttgaccggcttggagcaaaagggatgtttctcggcatgatgaccgcgtttttgtcaggtgaaatctacagaagaatcgttcagagaaacttaacgattaagatgcctgccggtgttcctccggctgttgctaaatcgttcgccgcattgattccggcttttatcacgcttaccgtcttcctcttgatcaatgcggctgtcacccagatctttcacaccaatctgcatgatgtcatttatcatacggttcaagccccgcttgtcggacttggaagcggcatcattcctacattaatcgctgttttctttattcagattttatggtttttcggacttcacggacaaatcattatcaattccgtgatggacccgatttggaatacattacaggtcgaaaatttggcagcgtatacagcggggaaagagattccccatattatttctaagccgtttatggagatttacaccgtcggaatgggcggaaccggaatgacattggccatagtgatcgccatcttgctttttatgaaaagcaaacagatgaaacagatatccaaactcggtctcgcgccaggcattttcaatgtcaatgagccggttattttcggtttgccgatcgtgatgaacccgatcattatcattccgtgggtgatcgcgccgatggttgtcacccttgtcacctacctggccatgtcggcggggatcgtgccccctcctaccggcgtgaccgtgccttggaccgtccccctattcattaacgggattatggcgaccaattccgtcatgggcggcatcatgcagctggtcaacctctgtattgtgtttgtcatctggttcccgtttcttaaagcgctggacaaattaaacatggcaaaggaaaaagaagctgagaccgagcagcatgcccgggatgacagcatgagtatgtaatcaaaatcgcagtaagggagagaaatcaattgactgaatcaaatattcaatatcgttttccggaaggattctggtgggggtcttccgcctccgccacccaaacagaaggcgccgctgacagagacggaaaaagccaaaacatatgggattactggtatgaaaaagagccgagccgtttttttaacggcgtcggccccggcgacacgtcacgtttttacgatcaatacaaggaggatatccggctgatgaaagaaatcggccataactccttccggctgtctatttcctggtcaagattgattccggacggaactggcgaggtcaatcagaaagcggtcgcgttttatcaggacgtcatcgatgaaatgcttgcccatcgcattgagccgtttgtcaatttgtttcactttgacatgccgctcgcccttcagcgtaaggggggctgggtcagccggaacaccgttgacgcgtttgaacattacgccaaaacctgcttttcgctattcggtgacaaggtgaaaaaatggttcactcacaacgagccgattgtgccgattgaaggcggctatttatacgactttcactacccgaatcacgttaattttcaagaagcggtgcaggccggtttccataccctgctgtcgaatgcaagggctgtcaaagcctacagagaattgaaacaggacggacaaatcggaatcattctgaatctgacgccttcttatccgagaagctcacatccagaagatgtcaaagcgtcccggattgccgacgcctttttcaaccgctcatttttagatcccgccgtaaagggcgaatttcctgaggagcttgtcgagattctcaaggcggaaggctttctgccgcattatgagaaagaagatctccgtctcattcaggagcatacggttgacctgttaggcgtgaactactatcagccgaggcgcgtcaaggcaaaagaacatgttccgaatccgcatgcccctttcctgcctgagcgtttcttcgacccgtatgtcatgcccggccggaaaatgaaccctcaccgcgggtgggaaatttacgaaaaaggaatctacgacattctcaccaatctcagagaacattacggaaatatcgagtgttttatttctgagaacggcatgggagtagaaggcgaggaacgcttccgcgatgaaaacggcatcattcaggatgattacaggattgaatttatccaggaacatctcaaatgggtgcatcgggccatcggagaaggttcaaatgtaaaaggctatcacctgtggactttcatggacaactggtcttggacaaatgcttataaaaaccgttacggctttgtatctgtcaatctggaaaacgggggcgaacggaccgtcaaaaaaagcggccgctggttcaaagccgtttccgatcaaaacggattttaacagatgaggagggacggccatgcttggaggtattgaagccggcggcacgaaatttgtctgtgccgccggacaaagagacggcaccattctggacagagcagagtttccgacgggagaaccggatgacacactcagacaggtcatccgttactttacagatttcccgatagaagccatcggcatcgggtcgttcgggccgattgatatccgtcctgacagtcaaacatacgggtgcatcaccgcgacgccgaagacagcctggcggaactgccctattcttcaaacgatcaaaagcgctctgggtattcccgcaggcttcaccaccgacgttaatgcggcggcgctcggagaagcttctttcggcgcggccaaaaacgcggacagctgcctgtatttgacggtcggcacaggcatcggcgcgggcgccatcatgaacggcagatttgttcaagggctgtctcaccctgaaatgggccacatttatgtcagaagacatccggacgacggctacaaaggcaattgcccataccatacagattgtctggaaggcctcgcggcaggccccgccattgagaaacgctgggggaaaaaagcatttttgctcacggatcagcaggaagtgtgggagcttgagggctattatattgccgaagcgcttgtgcagtacattctcatactttcgccggaaaagatcattctcggcggaggcgtcatgaagcagcggcagctgttctcttctatccgtcagcacgtgaaaaagcggctgaatcaatatattgatctccctgatattgaaaaatacatcgttccccctcaattagggattcactccggcgcggccggttcgctcgtattggcggagcaggccttagaagcggcaaaccgggaggcgggaaaatgacgaaactcttatttttggaaccggtttttaaagaaagattatggggcgggacgaagctgcgcgatacattcgggtatgagattccttctgagcggacgggagagtgctgggcgatttcagctcatccgcacggtacttccattgtgcggaacgggccttttcccggaacatcattacaccgtctctggaatgaacaccctgacctgttcggacatccgaaagaggacgcctttcccctgctcacaaaaattcttgacgcaaatatggacttatccgtgcaggttcatccggatgacgcatatgcacatcggcatgaaaacggagaactcggaaaaacggaatgctggtacgtgttggactgcaaaaaagacgcggagctcattttagggcatcgcgcccaaacgagagaagacttcgttcggctcattgaacgaaacgagtgggatcacctgctccgccgcatccccattaagcccggcgactttttctatgtcccgagcggcacactgcacgctttatgtgaaggtacgctcgttcttgaaatccagcaaagctctgatgccacctaccggctttacgactatgaccggacggatgggaacgggaataaacgcgagcttcatcttcagaaagcaattgacgtaacagacattccccataccgatgaaaatgtaaaaagcacaaagcatcagatcggagatgctcttattacaacactcgcagaaacacctttcttttcagtttatcaatgggatgtgagcggaaaagcatcatttcccgcacccggccggtatttactcgcaagcgtcatgaaaggacgcggagaactggatggatgtcccattcacaaaggcgatcactttatcgtgccggcggattccggagattttgttatagaaggagattgtgaggttatcgtttcacatccttcatcatcctaaaaatcaggaggtcttttatatgctcaaaaagttagcagtctgcctgtctatcgttttattactcttaggagccgccagtccgatatcggctcacaccgtttatcccgtcaacccaaatgcccagcagacgacaaaagatatcatgaactggctggcgcacctgcccaaccgttcagaaaacagggtcatgtccggggcgttcggcgggtatagcgatgtcactttttcaatgacagaggaaaaccgcttgaaaaacgcgacgggacagtctcccgccatctacggctgtgactatgggagaggatggcttgaaacagcggatatcaccgattctatcgattacagctgcaacagcagcttaatctcatactggaaaagcggcggcctccctcaggtcagcctgcatctcgcaaatccggcttttccatccggaaactataaaacggccatctcaaacagccagtacaaaaacatcctgaacccttcaactgttgaaggaaaacggcttgaggcgctgctcagcaaaatcgccgacggccttactcagctgaaaaatcaaggcgtcaccgttctgttcagaccgctgcatgaaatgaacggcgagtggttctggtgggggctgacaggctacaaccaaaaagacaatgaaagaatctcgctgtacaaagagctttacaagaagatataccgctatatgacagagacaagaggattggataaccttttgtgggtgtattcgccggatgacaacagagactttaagacagacttttacccaggctcatcttttgtggatattaccggtctggacgcttacttcactgatccgtatgcgatatcaggctatgatgaaatgctgtctctgaaaaaaccgtttgcctttgccgaaaccggtccgtccggtaatatcggaagctttgattatgctgcttttatcaatgcgatcaggcaaaagtatcccgagacaacgtactttttgacatgggatgaacaattaagtccggcggccaatcaaggcgcgcaaagcctttatcaaaacagctggacgctgaacaaaggcgaaatatggaacgacgggtccttgacgccgatcgcggaataactgcttcttttgaaaatcggttttaagaaacggctctgctgggcatattgttaccgttcaaaaaggagggttcaacaatggaaaataacaaaaacagcgaagaaacgctttccagtaaaacgaccggtaaaggcgagtcagaagacacgctgacaaaccggcagggccatccggtcactgacaaccagaatgtcaggacagtcggcaatagaggaccgacgacattggagaattatgattttttggagaaaatcagccactttgaccgcgaacgaattcccgagcgcgtcgttcacgcgcgcggcgccggggcacacggatactttgaggcgtacggaagttttggagacgaggagatttctacatacacaagagcgaaagtgtttcaaaagaaaggaacgaaaactccggcgtttgtgcggttttctaccgtcaaccatggaaagcattccccggaaacattgcgtgatccccgggggtttgccgttaagctttataccgaagacggcaactgggatctggtcggcaacaacttgaaaatcttttttatccgtgatccgctgaagttcccggatcttgtgcacgcatttcagcctgatcccgttacgaacattcaggacggcgagcgtattttcgacttcatttcccaatcaccggaagcgactcatatgatcactttcttgttttcgccgtggggcatcccggccaactaccggcagatgcagggctcaggcgtccatgcctacaaatgggtcaatgaagaaggaaaagccgtgctcgtcaaatatcactttgaaccgaaacagggcatccgcaacctgacacagaaggaagcggaagagattcaggggaaaaactttaaccatgcgacacaggatttgtatgaagcgattgaaaaaggcgattaccctgaatgggaagtgtatgcgcaaatcatgactgatgacgaacaccccgagctggattttgatccgcttgatccgaccaagctgtggtataaagacgatttcccttggaagccgatcggtaaattggttctgaacaaaaacccggaaaactaccatgccgaggtggaacaagcgtcattcggaacgggcgtgcttgtggacggccttgatttttcggatgacaaattacttcaggggcggacattctcctattcagatacccagcggtaccgcgtcggcgcaaactacctgcagcttccgatcaactcgccgaaaaagcatgtcgccaccaaccaggaaggcgggcaaatgcagtatcgggtcgatcgggcagaaggacaaaacccgcacgtcaactatgagccgtccattatgggaggactcaacgaagcaaagcaggatgggaaagaccatacacctcatgtcgaaggcgatgtgaagcgggaggcgatcgaccggtcgaataacttcggccaggccggagaaacataccgcagattttcagaatttgaacggaacgaattgatcacaaacctggtcaatacgctttcttcctgccgcaaagacattcaggatcaaatgattgagaatttcacaaaagcagatccggactacggaaaacgtgtggcggaagggctgaagaaagccgccgaaagcaacagcggcgggccgatcggcactactgatacagcacaagccgcaaaacaggctgaacaggaaagccatccgtctgatccgtattaaataaaaaaacaggacaatcgcgtcctgtttttttttgagctaattcagctcctgtatattctgctccgccgcggccgcaaatactttcggctccggacggtcaagatcttcatggaataaacttactttgtgaatctgccggttgtcgtacagatgaaagtagtagttcccggtgtcacagcacatgaccgacgtatactgcgtataatcaatttcattctcctctgtgatcaccgcgccttttggaatattcacattggacagcacgtgaaaagcggccgtaacgccatccgtttcatgagcggcaggctctaaatgctctttcagataagcggctctgataaatcgggatggcggcgtgtaatcaccgggaagcccgatcgttccagatccttggccgaaagcggttaatgtcattccgcccaatgttttgctttctgactgctgcggcctgattccgatataatggcgcagattggtcacatgccaaggaaattccggactgttggtcatcactccgggtttgttgtcatatactttcattccctccggtgtcggctcgatgacaatgcagccgcccgtgcggtctgataaaatccaatgaagaggcagcaccgtatccaataacattaacttcttctctacaatcgtcagcattgagagcttttcctttatgtcttcaagagattcacagtttgataaggcccaggtgacaaactcatgaggagcgatgtgacaggtgccctcccgttccgctttctcgtatcccgcaaagcccggaaaatacagcgtcgcacacgacagccctttttcatttacgccgtcggcaaacagaacattgccgagatttctccccatgccgataaatgcgtatttcgtcttatgcatcctgccgtcagcttcgcttttccagctgtactgacgagggtaaagcacgatgtccgtaccgagctgatatgcaaaatccatcgttcgcgccaataggtgattaccgtctgtcgttttcaatgtaagacttgtacacatattatcaatccccttttcattaatgaaatttacacaaagtaaactattcttccagcttaacgaataatggctccattcgtcaaaagattgacacatttctccttaatacatattagtccgtaagcatatccatgccttttaaaccctggcaaatcgttttggcggcagtgtttgttccgtttttcaaaaaaacttttgaacggctgtcaacgaggctttacaatgtttttcctgcatgctggaatttgtaaacggcaggtcaatctgttaagctatgtctttatgttaaagaagaacatacggaggagattatctattgaaagtagaaaggcgaacgattgaacatattccgcatgacgaaagacacggaaaggctaaagatttattccccgtctggttcggggctaatatgcatattacgacgttagtcacaggcacactgcccgttacaatgggactcgatctcttttggagtatcgccgccattattatcgggacctttatcggcgcaatctttatggcgtctcattccgcacaaggacctcagctcggaattccgcaaatgattcaaagccgcgcgcaattcggcgtgatcggagcgattctgcccctctttttggtcatgtttatctacctgggcttctttgcgagcagtacgattctcgcagccggtacactgagcagctttgtaccgattccggcttcatggtgtattatcggcttaagcgccatctgttttttactcacgatctacggtcatgatctgattcacaaaatgcagaaaatcctctcttggacctcctttgccgttttttttgctgcaacgattcttatttttcaactgccgattccttcaggaagctgggtgcccggctcattagacctgcctgtttttctagtggcggtcagcgcggtggccacatggcagctggcatatgcgccatatgtcgcagattattcccgttatctgccggtcaaaacaccggcatcgcataccttttggtacagctacgcaggtacgtcagtcagttccatctggatgatgcttctcggcgccattttgacgacggcgctcccggaatttaccgctaatgcgggaaatgagattgtccgattgttcggtccgttttcctttattatgctgatcatcgtcctgttcgggcaaatggcgatcaacgtctttaatttatacggagcctttatgtcaaccacgactaccttggagccgtttttaaaactgaaggtgacgccgaaaacgagagtggtaatgatcctttgtgtgacggcagcaggtactgtattaagtctcttgggccaaagcaatttcatggaactgtttttaaatttcatctttttcatcagttatttcttaattccctggacggcgatcaacctcgtggattactattttatccgccgcggaaaataccacgtcaaatcgatgtttgacgtcaacggacaatacggcagggtcaattggattacagcggccgccttcgttttgtcgattatattagaaatcccattcatcaatacatccttttacatcgggccgctcgctgaaatattcggcggaggcgacattgcctgggtcatcggcctggccgttccgtcgctgctgtattatgtcctgatgaaatcaagggtaaaacaacaagaggcgccttctctatgaagacgccttttctttattcatattccttccatacacgcggcagcagttcagaaagttcgtgcgccaataaggtatgggcggagcgctctttcgtccataactccgcacattcaccgtgaaggcggacggcgttcaatacggcatgcttcgggtcttgatgacagcacagcatgccgagaatcattcccgtcagcgtgtcgccggtcccgccttttgcaagcgcgccgtttcctgttgtattcctgcggcattccccgtcgggaaaagcgataatggtttcgtttcctttcaggacaatcgtggcgtgaagccgctccgcccattccgcggcatatcccgctctgttctgctgaatctcttgaatcggaaggcctgtcattctggaaaattcgccgggatgaggcgtcaagatcacgggggctttcctctttggataggttcttttcgtaatggcgcccgcgtccagtatgacgggataatcggcagaaagcagctgatcagccgcctgctgcacttcgtctgtttggggaaggcccggtccgatggcagcggcccggatggtttccccgggctggcccgccgcggcttttttccagccgtcacgccagtacgtcgcttccggcagcaccgggacgataagcgggatgacgcctgccgatgtaccgatgacgagcttgccgacaccgcttctcatcgcgcccaatccggccagaagggcagctcccggcatgtcttcgctgccggccagcaataacgccgtcccgaacgtccccttatggctgtctgcctcccgcttcggcagcgtatctttcacatcctgttccgtccaatccattatattcatctctgtacctcctcttctgtctcctatttatattccaaacaagaagagattttaaaccgcacaaaaaaaacagccgcttgtttgcggctgtttatgttctgattggaacatcaagacggtaaagcttccggtaccgttcgttttctgcaagcagctcttgatgagttccttccatttctgcttttccattttctaaaaagacgattttatcagctgtttccacacccgctaaatggtgtgtaatccagaggatcgttttctctttaaagacatcaaaaatcgtatcaagcaattctcgttcagtgaccgcatcaaggccgaccgtcggttcatcaaggataatgaccggcgtgtcttggagcagaatacgggcaagcgcgatccgctgccgttccccgcctgagaaacgaatccccgtctcctgcacggacgtttcatatccgtcaggcaatgattcaatataatcatgcagcttcacttgccgagccgcacgcttaacatcttcatcactcgccttgccgtttccgagccggatattgttcataatgctcgtgttaaagagatgaggtttctgattcaaaacggccaccgctgaggaaatctgctcctgcacggccgcagtttccagcccgttcagcatcactttgcccgaatcgggaactaaggcgccttcaattaaagcgagagaggtcgacttaccggagccgctcctgccgagcagcgccattttttcaccttggcggagagtgaaggaaaaacggtcaagcacatgactgtgctgatcataagaaaacgtcacgttatcaaatgtaagtgtcacatccgatacatccagtttctcatccgtctgcttcacctcacgacttcgcagctccggagccgcctgactcattcttttgatggaatcctgataagaaggcacttccgtcagcgcatccgaaaggggcagaaacgcctccgtcaatggaaatacgacaagcacaaaggccgcgatcatcgtgttggcgatgctgccgtccgcatactgacccgccgtccagaacagcatgatcaatatgaagccgccgacaagacattgcgcggcgagatcacgccatctcgtaaaccgctgacgtttgctttcaagatcaaaccatgccttctctttctcttcataagaggaaataaaggccgcctggcgtcccgagaacatccagtcgctcacgccgagcacggcatctgtcagccggctgtagagcgtattccggccgcttttcagcctcatgtttttcgctctcgtcacaagaagcgacacaaccggaaacaatacaaccaatataaacagataaatcgccgcaaaagcggcaaacggccaggaaaaaaagccgagtccgataacggatgccgcatacagcagcaaagcggaaaccgcagggaaaatcgtttttaaaaacgcatcctgcaaatgctcaatatcctcagccaaaatgccgagcatgtcgcccgtccgaaaacgggatgaaagcatgagcgaggccggctccagcatattgtaaagccgcaccctcatgtcggacacgattttcaaaatgatatggtgccccgtcagacgctcggcgtaccgtgagactgaacgggcaatcccgaaggtccgcacggctacaatcggaacgtacaccagcaggatattctcaggcctagccgccgacttagagatcaaaaaaccggaagtgaacatgagaaaggccgccgaaaaaatcgtcaccgcgcctaaaaaaatcacaagaacaaacaaacgggcattttgcttcatatacggcagaatccattcttcttttctcatgttctttcccccagttgcgcctttacaagtttggcgtatacgccttgtttcgccatcaattcgtcgtgggtgccgatttccgccaccgcgccgtcatcaagcacgataatttcgtccatctcaagcatccagtgaagacggtgagtggccagaaaaacaagtttgttttcaaacaggtctttcatcgtttcttttatttcatattctgtttcaatatcaaggtgagcggtcggctcatccaaaaggagaatcggccggtttcctaagaaggctctggccagcgcgacacgctgagcctgccctccgctgagcgcccgtccgccctcgccgatccggccgtcaagaccgccgggcagatcacggatcagttcggaaagacccgccgatctagcggcctgcgccgtttcctcacgcgaagcatcaggatgataaaaccggatattattcaaaagcgtgtcatcaaaaatatacgggtgctgcggaatatagagcagctgcttctgccagccgtccgactgcagatgcgagcgggattcaccgtttaccttgatctcaccggacgcaggctctaaaaagccgcccagcacatcaatgagtgtcgattttcccgcaccgctttccccgataattccgattttcttcttccctttaaaggacagatgaaattcagacatcgattcccggacggacaaacgcgtaagctgtaattcatcccggtcagtccacgtatcaagttcgagcggcttttcttctttaaaaccgggctgcgccaaaatcgcttgaatggttttccccgcctcctgcccgtttaacgtcgcgtggtaatcatttcccacttcgcggaccgggagaaaatattcaggcgcgagaatgagcgcggtcaatgccggcccgagcagaatttgtccgtctatcagccgcaagccgagaaacaccgccactgtcgccaccgacagcatcgtaaagaaatccagggcgaatgaagataaaaacgcgacccggagcgtgctcatcgtcgccttgcggtatctctcactgacatgaaagatgttttcactgtgtgatttgcttaatcctaaaaaccgcaatgtctccagtccgcggagcgaatccacgaaatgattggaaagcgtctgataggacttccattggcgatcggcttttttctgtgcgacaagtccgagcagaatcataaatacaatcaaaatcggaagcgcaagaatcagaatcaatgccgatgttttatcctgaaaaaacacgtaaataacaacggccgccggcacaatcgccatgctgaccattttcggcagaaacagctctaaataacggcggaactggctgatgccttccatcgccagcgtcaccatccggcctgtcccctcttttttcacaaagcgggggccgagacggaacaattgctcaagaaatctttttcttaagtccgcgccggtttgcgcggcatattggtacacgattttctgccggaccgctgtcaccgcatgccggatcaaaaacgcaagcaggaaaaagccgataaccggataaagagaagcaatccgcttcccgttaaataatccggttaccgcctggctcagccattccgcctgcaagatgatggcggccgtttgtataatcgttaatcccgtaatgatcgcaagaatccgcttcattcctttataaagaaacaggtcttttcccattaataagtcataggctccttatggctgacgcgtttccggaagacataatagctccagatctgactgccgatgacaaacggcagcagagtcagtgcggcaattgtcatgaccttaagtgaataatcaccggaagacgcgttagctactgttaagtcatacgcgcttttcagcgagctgaccatgacgcgcgggaacagagagataaaaatcatcgcaactgtcaaagcaagacccgcgccggtcataccgaatgcccagccgtcttttttcttgctcatgaacacaacagcaagaacgttgcagatgacaatcagcacgaataccggaatcgtgatgtttgcccggcgtgtaaacatgtccgtatcgtatgcagacatcgcaaagaaagcaagtacaacaagaaagataacaccgattacgcgttttgccatttttctcgcacgctcttgtaaatcaccgatcgtgcgcagggtgataaacattaaaccgtgcaggaatgaaagaagggtgacggctgctccgccaaggacggaatacacgttcacaatatctgaaaaacccgcatgcatattcatatggccgtcaatcggcatgccgcggaacaagcttgtgaagataaggccgaatacaaacggcgggataaggctgccgaagaaaatcacccagtcccatgttttgacccattttaaatgattcacttttccgcggaattcaaacgccacgccgcgtcccattaaagcaagaaggatgatgataaacggaatataatatccgctcagcatcgtcgcataccagttcgggaatgccgcgaagatcgctcccgtacctgtcagcagccatacctcattcgcatcccagaacgggccgatggtgttaatcagcactctgcgttctaattcattatggccaagaaatcgggtcgaaatgccgacaccgaaatcaaaaccttctaaaaagaaaaatccgacaaacaaaactgaaacgagtataaaccaaagatcatgaagtgaccccatggtagacctcctgactgaacggatccgttgatacaggaacatccttgtgatcatcatggtccgcaccttttttaatttcacgaacgaataggaagacaagcagcgcgcctaaaatcaagtacatgacgccgaagccgataattgaaaacagcagagatcccgtcgttacgttaggcgaaacggattgtgcggtcgtcatttgccccatgaccgtccacggctggcggccgatttcagtcataatccaaccggcagagttcgcaatgaacgggaatgcgatcagcgcgatcatgccccgtaaataccacttgctcgtatgaagctttttgcggcggttcagaataaagccggcaatcgcggcaaaaatcataagcgcgcccgctcccgccataatgcggaaactccagaacgtcgttttaacaggcgggatatagtcgccttttccgtacgttttttcgtattctttttgaagtgttttcatccctttcacactgccgctgaacttctggtaagccaagtagctcagtgcgtaaggaattgaaatttctgatgtgtttttttctttattcgtatcaatattcgcaaaagccgtccacgcggcaggatcaccgctgtcatcccaaagcgcttcactggcagccattttcatcggctgcgattccattaaatgctcagcctgcatatgtccgctgaacgcaacgccgataccggcgatcagaccgacaatcatcgaaagcttgaaagatttatggaagaaaggcacttcttttttcttcaataatttaaatgcgctgacaccggcgataaagaaagcacccgtcgcaagcgccccgaaaatgacgtgaggaaattcaacccaaagctgagggtttgtcaaaagcgccccgaaatcattcatttccgcgcggccgtttttaatcgcaaagccgaccggctcctgcatgaatgagtttgccgtcaaaatccagaaagatgacataatcgttccgaaggacacaagccaaatgcaaagcaaatgcacttttttagataaacggtcccagccgaaaatccataatccgataaaaatagactccataaaaaacgccaaaagcgcttcaaccgcaagcggagctccaaatacatctccgacaaaacgggaataatcagaccagttcaatccgaactggaattcctgaagaatccctgtgacgacgccgacagcgaagttaattaaaaagagatgcccccaaaatttagccattttgagataggtctcttgttttttgacaacataaagcgtctccatcaaagcaaccataaacacaagcccgatagacaaaggcacaaacaagaagtgaaacaatgttgtagatgcaaattgaatgcgggctaataccaactcactcatgatgtttttcctccaatctggtaaattgctcaacatttcacaaacatagcaaaatcattgctcggtatttcacaaaaaatgatatatttgctcaatgtttcacaaattcgtcaaaactattgaaatatcagcctgtacaccctgggggacagcggctgtcatagaaatgattcaatatcattactttacaacgattcagcctaaaaaaaaagatcaatatacctaaaataaggctgaaattgtgaccgattattgtcggatttgtagagattttatgtcagcacctaggatatttgtccctttgatatcgtacctcttttttattcgtgtggcgaacaaaatgcttttctcggtgaaaaatcccgccaaatcgccattttgagaaagaaaatgtgaagaaagcatgtcctctagtaaattcataatatatgaacaatttaaattttttagtatactttaaatggggatattttttcactacataacgactgggggaacaagcatgggagaacttcaaccaaaattgcaaacggattcaatccaaaaacaggaacggactgataactggtttgccagagcaatgaatataagaatcggcattattcctcttcctatctatatcctgcttttcttgcttattacggtgtttgtcatgagccgtgatgtaaaaagcgacattctgacatcaattgccgtcatgagttttttcggatttaccttcggccagatcggaaaatcgattccgatcgtgcgttccatcggcggccctgcgattctcgcaacctttattccatccgctgtcgtctactaccacttgcttccgaaagacattattacttcaacaacagaattcacagaaagctccaactttctctatctatttattgccggtatcgtcgtcggcagtattctcgggatgaaaagagagacgctcgtcaaagctttcgtcaagatttttattccgctgatcgccggctcgatcgcggccgccatcgtcggcttatgcgtcgggacgctgctcgggctcggctttcagcacacactgctttatattgtcgttccgattatggcggggggtgtcggtgaaggcgcgattcctttatccatcggctactccgatattatgccgatgtcccagggagacgcctttgcgcttgtgctgccgtccatcatgctcggcagcctgtgcgccattatgttatcgggtttgctgaatgtcatcgggaaacgcaaaccggaatggacgggcaacgggaaggttgataagtctgatcattccgctcccgcattggaacagccggccaatgataaaacgtttgatttgtcctttttcgcttcgggcggtattttagcggtttccctctatttggtcggcatgctggcgcatgatttctttcagcttccggctcctgtcgtgatgctcgtctttgccgttctcattaagctgttcaggctggcgccggcttcgattgaaaacggagccttcggcgtctcgcgctttttctcgacagccgtgacctatccgctcttatttgcgatcggcgtttcaatgacaccgtgggacaagctgattgcggcgtttacgatcagcaacatcattaccattttatcaatcgtcgtcacgatgatggccgtcggttttctgaccggaaaatggctgaatttgtacccgattgagacggcaattattaatgcctgccattccggccagggcggcaccggcgacgtcgcgatcttgagcgccgctgaacggcttgagcttatgccgttcgcccaagtgtcgaccagaatcggcggagcgattaccgtgagtgtcacccttctgctgcttcatcaattctattaaactgaaaaaagcctccgcatatgcggaggctctgttatttcatcacattttgaatataagagccgaatgccgcgccggacatgcccggcgacacacggacgcggtgaagcccgtaaagcccctgatctcttgacgccgctcccggctccgtcgtaaccgccatacggtagcctgacgcggcggcggcttttaatgtttccttattatatcgtccgactgggtagctgatcatagacgtccgctgcccgaacatttgatcaaataaacgcttagagtccttcatttcacgtcgctgctgctgcggtgtgagcccgttcaattcgagatggttcatcgtatggctctgaatggaaatgccgtgggcggccatctccttcatctgcttctcagtcagatgattcttatgcccgatatagtttccgatcataaagattgtcgctttcatcttgtatttctttaaaataggataggccgctttcacattgtcggtatagccgtcatcaaatgtgatcagaacacatttttcacgcggctccttatcctccgtcagcatcagataggcctcttcaggagtcatcgtataatagccgtgatcatgaagccacttcatatgctgccggaattcttccttcggcacacgcaggctgtttccctcagaaatgctgtggtacatcagaatcggcagtcttgccgttcctttcgtttgaacccaggcggacgtatccggctcttttttgatttggcgctttacagactttttatcgtggtgcgcttctgccttcggaatgctttgttcggcgcttgcctcatggcccgagcaggcggcaagcgtaaacacggcagccaaaaggcacatgcacatgatcatgcgtttcatcgttttcctgctttctgtcttctatttactttttatatcggttatgcgtcataaattgttacatcaaaaaagccggacatccagctgtccggctttgcgttatgagcggattctgatttctgtttcactgtcaaaaaagtgagctttattcatgtcgaaagcgacggtcaattcctcaccggcacgtatgtcatggcgggcgtcaatccgggcgataaaatcctgatccccgatccgggaataaaccataatttctgacccgagcaattccgcgacattgattttagctgtgatggatgaattcttataggattctaccacaatcagctcatcatgtatgtcttccgggcggatgccgaagataacctctttgccggcataccctttttcccggagcattttcattttcccttccggcacgctgagagcggctgaaccgatctgaatggcgccgtccgtcagctttcctttgaaaaagttcatcgctggggagccgataaacccgccgacaaatacgttttcgggatgttcatacacgtctttcggcgtgccgatctgctgaatttttccgtccttcatgacgacgatgcgtgtcgccatcgtcagtgcttctgtttggtcgtgcgtcacatagattgtggttgtttgcagcctttgatgcagcttaataatttctgcccgcatctgcacccgaagctttgcgtccagatttgacagcggctcatccattaaaaacactttggcgtccctgacaatcgcccggcctaatgcaacccgctgccgctgcccgccggagagcgccttcggtttgcggtgcagatactctgtgagccccagcattttcgccgcttcctcgacccgtttttttatctcaggtttcggcatcttcctcagcttcagaccgaaagcgatattatcatagaccgtcatgtgcggatataacgcatagttttgaaacaccatggcgatatccctgtctttaggagcgatgtcattcactctcgtgtcaccgatatagaaatcgcccttcgtaatgtcttccagcccggcaaccatccgcaatgttgtcgacttgccgcaccccgacggaccgacaaacacaataaactctttatctttaatatgaaggttaaaatcatcgacagccgcttctttttgatcgtaatacttataaatatgctccagccgaagttccgccatgtcatctccccctttttgcaaacgctttctttaataagattgtaacagcgtcagacggcggcggatataggcaatgttcataaaaaaagtccgctgccttcgtgcacatttcccatttaatgtgatttttcatactgcagacaaatgaaataagccagcagggcgccccgatatgtcttaatatcaatacccgagcgttccgcaaatttatcaatccgatattgaagactgttgcggtgcaaatgcagtcttttcgatgtgagcgacatgttcgagttatgttcaataaaagtctgaatcgtatgcttcagctccggttctttctgaaacagcagcaccgcttcttcgtgaagcaaggctgagagcttttctctgctttcttccgtgagcatggccggaaataccgtttccgcggtcagcgtgctcagctgcgggagataacgccggccaatctgacaatattgctgttctctccgataatgaaggcgcagacgttctcccgcgccataataccttccgatgaaaaaacggacactgaaataaaaatcgccttcgagaatcttcacaaaagatgcgatgtcatccgaatctggcgcttccagcttttcttcctccacaatcacgccttgatcccttcccgtccggacaactgtatatgaaaccggccagaaatggcgcagcgcttccgtaaatgccccccaatcccgttctcccaataagtcataatggataaaacggacacgaggctccttgacatcaggcaccgggccttcttccagcagaaaccgccgccacctctttgctgccgccgtctccggaaaaaaatcgcctttttcttcagcgggcgtcaaaagtgattccagaagcagtttctccttcggggtgatatcctccttcggaatggcgacatagacccgccttttctcatcataaaagcaaaagacatcctccgccgtacagcacttatcagacaacacagccctcgggtaaattgccaataacgggttcatatgcgctcctctctatcgctctatcatattttcagtataaaacgtccggccgattgtatccacttcgttttaagaaacagctttcaggctatttcccgggaaacggatcataacagcttctgccggcataagaaaaaaaccctccgcgccggcagagggatcctttttatttagagatatcgacgaagccttcaccaaagacgtcacgcacatcatgaacaatgacaaacgcttttgtatcacagcttttaataatttttttgagcatggaaagctcttgtttctggatgacgatatataaaatttctttcgactgccccgtgtaatttcctttacccgacagcagcgtaacccctctgtccataagcgtgttgacctgttcggcgatttcgtgcttatgctcagatataatcgtcaccgcttttttcgtattcaggccttcaatgataaagtccatcaccttcgttccgatgtacagcatgacaatggtaaacatcattttttctgcaccgatgatgaaataagaactgaagacgacaatcagatcaaagaacaaaagcgcatagctgatattccaatcgagatatttgttcgcaatcctcgccaaaatggcagaacccgcagtcgtgcctccgactcgaataatgatcccgattccgacaccggcaaacacacccgcaaaaatagtattaataatgagttcatgtgaaggcgagtgccaatcatgcgtcagatgcagaaacagtgagttggcgacaaccgtaatgatcgtataaagcgttgtttttccgtctaagaatttatatccgataatcaataagatcccgttcaaaatgatattcgtcaccccgggcgaccattcaaacacatagtacaaaatcagggtgattcccgttaccccgccctctccaagatcattcggaatggcgaataaattaacggccaaagcaaagataaaagccccaataatcagcatcagcacatccagcaatctctttttcatcccagacactccctttatataaaatcaaaaaagcccgggagagcactcttcattaaaagagcagaaactcccgggcttttatcccaacgtgtcacagcaggaacctgctgtgtgttttctctcggtccagaccaattcagcattgcggaaccctagaaaaccactgttttttatgttcagtttttgtatatctttcaagattatacgggaaatcacgaacatgttcaaccactcttttttccataaacgtataaaaaattcgaacgaactgccgatactaaaaaaggtccttaaaatacatgactaaaaaatcattaaaatactttttttctcaaaatattattgactataggttattttacaggcattatagtatgtagttttcaagaaatagtttacataggaggaaatattatggcaggcaacctggtgtcttgtaaggcatgcggcaaagaaatcgctaaaggcgttaaaaaatgcccaaactgcggtaaagatcagagaaacttttttatgagacataaaattatcacattgcttctggcagtagtggttattatcattctcgtaaacatcggcggcggaggcggatcttcatcatctaaaaccgcgtcttcaaaagctgcggaatccaaggaaaaactgtataacatcggtgacactgttaagactgagaaaactgaagttactgttacgaaagtcgaaaaaagagattcagtaggctctcaatttgtcgagaaaaaagcatctgacggcggcgttatcgtagctgttcaatacacagttaaaaatgtttcaaacaagccgttaagctctttctccattccaagagcgaaattagtagattctaaaggaacatcctatgattcagatattgatgcttcttcaagctatgcaacagaaacaaaagtagacaacagtaaaattttaagtgacttgaacccgaacattaaagttactgacgtaaaagcttttgaagttgataaaaacgcatactctaaaggcacttggaaattaaagttcagcaacgatgttgaagtgaaaattaaataatgaccgtaataaaagagaccttcaccatttgaaggtctctttctttttacaccttttggtacccgttcacattggaggactgccacttccaagagtcggcgcacatttcttcaagtccgcgctttgcttcccagcctaattcagcctttgcttttgccgggtctgcgaagcatgcggcgatgtctcccgggcgccgggcggcaaaacggtacggcacttcttttcccgatactttttcaaacgccttgaccatctcaagaacgctgtagcctcttcccgtgccgagattataggcgtcggcgcccgttgtgttcagcaccttctcaagcgctctgacgtggccctcggcaaggtcaacgacatggatgtaatcccgcacgccggtgccgtcctttgtcggataatcattgccgaacacctgcaattgctcaagcttgccgacagcgacttgtgcgacgtacggcattaaattattcgggatgccgttcgggtcttctccgatccgcccgctcgggtgcgcgccgaacggattaaagtagcggagcagcgcaatgctccattcagaatccgctttatgcagatcgcgtaaaatctgttccagcatcagctttgtctgcccgtaaggattggtcgcgcttaatggaaaatcctcagtgatcggcgttgtttccggaacgccgtaaaccgtcgctgaagaactgaagacgatttttttcacaccgtgtgcctgcatggcttcacataaaataaacgtccccgtcagattattatgataataacggagcggaacagccacagactcaccgacggcttttaatcccgcaaaatgaatgacggcttcaatctcattttcagcaaacacccggtgaacggcgtcacggtcaaggagatccgcttcataaaatacaagcccttttccggtaatgtctttcacacgctccaatgcttccggtgaactatttgacagattatccaaaaccacgatgtcatagccgccgtttaacagctcgacacatgtgtggcttccgatataacccgctccgcctgtcactaaaatcgccatgaagaaagcctcccctattgaatgaattgaccatattatatcggttttttcttcctcaatcatccatttccaaaaagtttaatcgtttagtcatcgtttcttcataatttgttttcattcgcgtaatacacagagccctcgattcaaacgggttgtgaaatagaaatccctcccccgcgcatggtaagataagacaaaggagatgacggtatgaaaaatgaaatcattgaacgctttacctcttatgtaaaagtcgatacacagtctgacgaaaacaatgaaaactgcccttcaacccccggccagctgacattggccaacatgctggcagatgaattaaagtcgatcggcatgacagacatcacagtcgatgacaatgggtacgtcatggcgactctgccggcaaatacggataaagacgtgccgactgtcggttttctggctcacgtggacaccgcgaccgattttaccgggaaaaatgtgaatcctcagattattgagagctacgacggacatgatatcgttctgaatgacaaactcaatgtcgtcctgtcgcctgagcaattcccggagctctcccgctataaaggccagacgctgatcacaacagacggcacgacgctgctcggagccgacaacaaagcgggcattgccgaaatcatgacggcaatggcgtacttgatcaaacatccggacatcaaacacggaacgatccgggtcgcgtttacgcccgatgaagaaatcggcagaggccctcacaaattcgatgtcggccgcttcaacgccgcattcgcctacacgatagacggaggccccctcggcgaactgcaatatgaaagctttaacgcagccgccgcaaagcttacttgttacggaaaaagcgtccacccgggaacggcgaaaaacaaaatggtcaacgcttcaaaaatcgcgatggaatttcatcacgcgctgccgaaagaagaagcgccggaatatacggaagggtataaaggcttctatcatttactttccatgaacggagacgtttctgaagccgccctgtcgtacatcatcagagactttgacagagaccgctttgcagaacgaaaagaatatatgcagaaaaccgccgatgcgctggcggccaaatacggcaacgaaagcatcaagcttgaactgcgtgatcaatattacaacatgagagaaaaaatcgaaccggtcaaagagatagtcgatgtcgcctatcaagccatgaaaaacctcgatatcgaaccgattatcgaaccgatccggggcggaaccgacggatcacagctctcttacatggggctgccgacaccgaacatttttacgggcggccaaaacttccacggaaaatatgaatacatttccgtcgatcatatggaaaaggcggtaaacgtcattgttgaaatcgccaggctctttgaagagcgcgcttaaaaccaaagccccctgctttggtttttttctttcacatgaaacctttccttctttctttccgtatataaggtatgaattggaaagaaggagtgaagactatggcaagagggactgtagcgaaagaattgaaaaaaaccttaaaagacccgcgtattctggagacgaaatcaaacccttttaaaaaactgcggaaaatgttcaaacgatttttttaagataacatctcgttttctttaaaaaaataaagaaagcgctgtcatcctgcagtcatctgttagaagcagttattttgcatatgataaggttttttagggtactgaataacacaaggcaaacgaaaacactgaagtagttaattagacacttacaaaaaatagtgaaaaagttatataaacgatcgtcattcatcagccgatacaatctatagaaccacaacaagagcaaaatctcttcaacccatagtcatttttacggaaaatgacgttattttttaaaaaagtgacaattgtttgaatacttttcgtttgttttttcgtacaataataataccaaaactttttttgggaggtatgtaaaatgatgctacttatttttgctgctttgacagggtatcttgttttctctttcagtaaggacaaccgccggaaaacgccaaagacaagcccgctggtgacagctgccgacacgaataacatcattgatttaaatgcgatccgtcaaaaacgccggatgccgctatcataaaaacgacagctgccgcaaaatcggcagccttttttttatgcacccggccgatatgaaaccaaccgcctccttttttcgtacaacataaaaaaggagtttttttatgtaccatttttacatcaaagagcgaatgtttacgtttaagaatcgttttcaagtgtttcttgaaagcggaaaagaagtctacaatgttgaaggaaagctgttttcattcggtgatgaactgaaactgactgatttggacggccgaacgctcgccagcgtcaaccagaaactgatgtcgctcgttccccgttacgagatttccgtcagcggcaaacccgtctgccaagtcatcaagaaagtcacgtttttcaaaccgaaatttgaaatttccggactcggctgggatcttaccggcgatgtgtggggccggaattttcaagtgacagacggaaaatcaaaccggatgaccgtcaccaaatcatggatgagctggggcgattcctatcatttgcagattgaaaaggaagaggatatcgttctttgtctcgcgatcgccattgtgatagatatgattctatttgagggtgataaataaaaatatttatcgaaatatattgacaatataagataatatactaagattaagagtattacagtttattctgaaaaatagcatatttccttatcaagagaggtggagggactggccctatgatacccggcaaccgctgttcagcagaacggtgctaaatcctgaagataaggttgagatttgcggacgcaagctcttccctatccgagggaagagtttttttatatttcatcaggaaagaaggaatcgttcatgtcacagcaaaacacagaacaaccattgcatacgcttctaagaaaaaacccgccgtttcgcgcggatcaggtcggaagtctgctgcggccggcggctgtgaagcaagcccgcctgcaaagagcggcgggtgagatttcggcagaacagctgcgcgaaatcgaaaacaaagaaatcatccgcagtgtgaaaaagcagaaagaaaccggcctcaatgtcgtgactgacggcgaattccgccgggcctggtggcattttgattttctcgaaaatttagacggcgtcgaagcgtttacgcctgaaagcggcattcaatttcacaacgtacagacgaaagcgcgcggcattaaagtaacgggagatattgatttttctcagcatccgatgctcgaagattataaattcctgcacagcattgccggcgatgctgttccgaaaatgaccatcccaagtccgaatatgctgtttttccgcggaaaattggaaaaagcggcctaccagaatgattacaaacaatttcagcacgatgtgtcaaaagcgtataaaaaagcgattcaagctttctatgacgccgggtgccgctaccttcagctcgatgacaccgcatgggccgttttcttatcagaagctgggcttcgtcagattgaagctttcggcacgacgccggatgagctgcgcaagctgtttgccgcttccattaatgacgccatcaaggatcgccctgacgatctgaaggttacgatgcatatctgccgcggcaacttccaatccacttggacggctgaaggcggctatgatgcagcggctgaaacgatttttgacgggcttgatcttgacggattgtttctggaatatgatgattcccgctccggcggctttgaaccgctccgttatgtcaaacgctctgatcttcagcttgtgcttggcttgattacgtcgaaacatggcgaacttgaagacaaggacgcgattaaacgccgcattgaagaggcttcacaatatgtcagcctggatcagctttgcctcagcccgcaatgcggattcgcctccactgaggaaggaaacctgatcacagaagaacagcaatgggcgaaactgcgccatgtcgtcaacattgccggtgaagtctggaaataaaaaaaaagacacgcgattagcgtgtcttttccgttttacagcggatcggttccgattaaaatatcgatatctatcgtgacatcagcctctttccggctgataaaccgccggatgctgtcatcagtacatttccatgttaagggcgtcattttcacaagccgctcgaggtcaagctgcgctaaagtctttgtgtaacacagccgtttgcgctcaaaggtttgaaagcccgcttggaatcgtccggccgcagaatcggcggtgtcattccgccgagggctgtctccgaagaagaattcccttacttccttcaaataatcacgccgcggcaccgctttaatgactgtgccgccctttcgtaaaagcctgctgcattccttgtaattccaaggtgataaaacagacatcacgacatcaaaacagctgtcggcaaacggcgcatccgccacatcagcgacggcaaaaaccatatgattcccgaaggcctttgcggcatgcagcacaccttctttcgagagatcaatgccgattcccgtcacggaaaaagcaggctgaagccatttgcatacggcggctaaatgagacccttctccgcaccccgcatccaatatcgccgctgatgtttgcggagattgaatatgggtgatgatggcggcaatctccttttgaaccggcgcaaaaaattcccggctgtcaaaaagctcgcgtctcgcttcgaacagctgcctgtcatagcgggttttgaccgatttattgaggaaattcacatatccttgttttgatatatcaaatgtatgcccctgtccgcaaatcaagcttcggtattgtgagaccgccatggccgaccggcatagcggacacctgaacacggactggcatgattgcagtaattccgcgcgttttctttttatagacgtcaaaaaaacacctcattcattcgttattccgatgaaatgaaaaaggcatagacaaataaaccttgctgaattggaaggtttaacctatttgtctatacctctcattatctgtaacgaatgaactggatgatcacgaaaatgaccccttttctgccgtcttttgaaggctgtgccctcagatccattttatcagctgcatcccgtctttacaatgaatcggaacggttttcaggggttttttatacctttattatccaattacttatgcacatcctttattttctttatttataatataaatttattattttgaaaatatctaaaaaggttgattttcaaaaattgaaacgataaaatactgctatctcatgtaatatcgttattcttgtatatgatcagtaatatggtctgattgtttctacctagtgccgtaaaagactagactacaagaaagtttgcataaatttgaacgagtgaaaagcatatgatgctgtcagtctattcttttcttttggctcttatttatcacactttctggctttcaggaatttgtgacgaataggagctttttttatttccataatacccttataggagttgctcacatgtactttttattgaacattgtcggtctcattgttgtcatggctgttgttttcttatgctctcccaacaagaagaagattaaatggcgtccgattgtcatgctcctcgtctttgagtttctgattacttggtttatgttagggacaaaagtcggcggctttgtcatcgggaagatcggcgcgttctttacatggctgatttcctgcgccagtcaagggattgcgttcgcttttccgtctgtcatggcgaacccgacggttgattttttcttcagcgcattgctgccgattatcttcgtcgtgaccttctttgatatgctgtcgtatttcggtattctgccgtggctcattgataaaatcggctggctgatttctaaaatatcccgtctgccgaagctggagagctttttctccatccagatgatgtttttaggaaatacggaagctttagccgtcatccgccagcagcttgccgccgtcagcaacaatcggcttttgacattcgggctgatgagcatgagcagcatcagcggctcgatcatcggatcgtacttgacgatggttccgtccacttatgtgtttacagccatcccgctgaattgcttaaacgcgcttttaatcgccaatatgctgaaccccgtggacgtttctaaagaggatgatattatttacgttccttcaaaagcggagaaaaaagacttcttctccacgatttctaacagtatgcttgtcggcatgaacatggtcattgtcattttagcgatggtgatcggctatgtggcgttaacggccgcgttaaacggcgtactcggactgttcatgcacgggttgaccattcaaaagattttctcatacatcttcagtccgtttgccttccttctcggattaggcgtacatgacgcgatgtatgtcgcacagctgatgggcatcaagctcgcgacgaatgaatttgtggcaatggccgatctgaaagggcagctgaattcacttccgccgcacacgattgccgtggctacgacattcctgacatcattcgcaaacttcagcaccatcggtatgatctacggatcttatcaatctctgcttgatggtgaaaaatcagccatcatcggaaaaaacgtctggaagctgcttgtcagcggaattgccgtttccttattgagcgcggcgattgtcggattgtttgtctggtaaaagaaaaaaagcgataccgctccattttggagtgatatcgcttttttttattgatagacggatgcaggtacgaaaacgtcccggattcctgccgcgtaaggtccgagatcatattgtccgaacacaacggcaatgccgtttttcgtaaagaagaaaggtctttcgctattcaggatgatctcttgttttttgacgtcctggtcaaacagatcgtcatgtttcttgatgtagccgtaaagatagtctctcgttttgttagctttcgtttttgtattcagcacattatcgagtgtgacccgttttttcgcggccaggtcgtaattaaaggtctgaacggatgtcagcccgtgtgcgccgcctgtgtaactgtagtcttccgtctgaatgctgagcttgccgtcttgattatacttcaccttaaaatctgtttggtattccgctttgtagccttgtttttcaccgtcttttttgtttttcacatattctttgtacgattgttcaatatagcgcttgaagtcctgattgactttcttttcaaaagatgcgtttcccgtatttgtgacctcggggtatgtcagctgctttacatgcttatacgtatggcttttgacaacaggctttgcggtttgcgcggcctcggctgaaggcgcgaaacctccgaacggcgcggctgtcagcacggttaagagcacggccgccatcattttgaatgcctttttcatcacaactcctccttttcattaccgttccctttttgaaaacgggttacactctatagacagcgcggatcagcaaattgtttctgggccttctttcacattttctccatgaaaaaaagagacatggaaaatccatgcctcttttaccgtgaaggtctttgcgcaatggcttcataaacggcttccgccaaatcggagttgccgaacatctccaaaacgccgatgacggtttgatcaggaatcggttctgattcctccttcggcacgacaagctcttcagccgttttttgcagctcttcgtttaaaggctgtccgggataagccttgctgtaaatggccatcggatcaaggtcatgattgacgcaccattgggcaaacaccaaaatcatcatgttttcgtcacgccggtaatattcttcaagttgtttttcggtaaacggcttcactatcattcgctcctccagaaaatctacccctaagatacacaaacacagagcggaagtaaaccaaagattatttcaccatcagtcagaaccctttaaataatgcaatgccctgactctctaaaactgttgtctgaatgtcccggacggatttgcacggaagccattttcgttttctttcacaagaaaaaagcgcccctctcataaaaggcgctttttattcttatatgtttctgtcccaatgccgatgctcagccacggccttcagaaattgttcatggttcccgtccggaacaaggccggggccgttttcggttccggcggcgagggcgagaagttcttttccttcaccggaggcgccgatcgctttgtaatggctgaaggcttcgctgacgaagtctctggccgatttttgggctttgaggctgtctgtgctttgtttaccgcccggaatgaaaacagcgtcgtacaggacggaatccgctgtcaggaaagtggctgacgctttcagctccgtaccgttttctcccttgacggttcccagcgcggggctgatgatatcggctctgactcccgcctgtttgcatgcgtcaagcacttgtttgactttctcatcagaaaacccgtggtcggttaaaaccgcgacctgccttgtcgctgccgtcttcaccgtgttttcctggcttaaggccggggaagtgaacgtttcatcagattcacggtccttcggcggcgggttcacgccgattcctttcgcaacacgctcggcaagcccggcgtcgacgtgactgaagacatcaaccacctgttgctgcacatccttgctgttcacttttccgacttcaaaacagaacgcggagatgatatgttctttctcggcgggagacatgctgttccaaaacatcttcgcctgagaaaaatagtcattgaagctctcactgcgctggcggatttttctgccttctactttttcctggtaatgaacgtatccgccttcttcttctgaagccggcgacggatcattgttctgcagggattttttatgataggcgacgggacccttattaatcgtcatccggtggtagccgtcgtattggttgttatggaacggacagaccggccggttgatcggaatctcgtgaaaattcggcccgccaagacggatgagctgtgtatctgtataagagaaaagccggccctgaagaagcggatcattggtgaaatcaatgcccggcacgacatttcccgggtgaaaggcgacctgttccgtttccgcaaagacattgtcctgattgcggtcaagggtcatttttccgatcagcttgacgggaaccaactcctccggccacagcttcgtcggatcaaggatatcgaaatcaaatttaaattcatcttcttcgtcaatcatctgaacaccgagctcatactcgactttgccgccgttttcaatcgtttcccacaggtcgcggcggttgaaatcgggatctttcccggcaattttctgcgcttcatcccatacgagggaatgaacgccgagcacgggtttccagtggaattttacaaagcgcgcttttcctttctcgttgacgaaacggaacgtatgcacgccgaagccctccatcatccgatagctccgcgggatgccgcggtcagacatcgtccacatgaccatgtgagccgactcagggttattagcgacaaaatcccagaacgtatcatgagccgtcgcagcctgcggcatttcattgtgcggttccggttttatggcgtgaacgagatccgggaatttgatcgcgtcctgaatgaagaacaccggaatattgtttccgacgaggtcatagttcccttcttcagtataaaacttcgtcgcaaatcccctggcgtcacggacggtgtcggctgaccccttggaacccgccactgttgagaaacggacgaaaacaggcgttttgacggacgggtcctgcaaaaatttcgcccgtgtatattccgtcatcggttcgtacacctgaaaatgcccatgaacaccgtacccgcgcgcatgaacgacccgttccggaatccgctcgtggtcaaagtgcgtcattttttcacgaaaatgaaaatcctccatcagcgtggggccgcggccgcccgcttttaaagaatgttcatcctcagacacgcgaagcccctgattggtcgtcatttttttgccgctgttatcagaccggtactgctccagctgttcgtcctttgagtgttcatttactcgtttgttttgatcatcactcatgtcagttcccccttttaaaacgaaacattctacagcacatttacccgcggcgttcttcatataaactgctgatccgctcattaggattttaggtctgtatttacatatgcggtcatacacattttgaaataagccattttcacagaaataaattgtgaaaacgcttaccgaaatagctgttgaacaggggaggtcatatcgtgcttgccatactcggttttgtgatgatgattgtctttatgtatcttattatgtctaatcggctttccgctcttattgctttgattgtcgttcctgttgtgtttgccctgatcagcggatttggcaaagatctcggcgagatgatgattcaaggcgttacagacctcgctcctaccgggatcatgctgttattcgccatcctgtatttcggcattatgattgactcaggtctgtttgatcccctcattgccaaaattctatcgcttgtcaaaggggatccgttaaaaatcgccatcggcacagcggttctgacgatgaccatttcgctggacggagatgggacaacaacgtatatgattacgattgcggcaatgctgcccctttacaaacggctcggcatgaaccgtttggtgctggcgggaatcgcgatgctcggttcgggcgtcatgaatattattccgtggggcgggccgacggcgagggttttggcttccttgaaattggacacgtcggaggtcttcacaccgctgattcctgctatgattgccggcgttctctgggtgatcgccgttgcttatctcctcggaaaaaaagaacggaagcggctcggtgtcatttcaattgaacacgcgccgtcttctgatccggaggcggcgccgctgaagcgtcccgctctccaatggttcaacctgctgctcactgtcgccctgatggccgcgctgatcaccagcctgcttcccatccctgttctttttatgatcgcgttcgccatcgccttgatgatcaactatccaaatgtcaaagagcagcagaaacggatttcagcgcatgcgggtaatgcgttaaacgttgtctcaatggtgtttgcggcaggcatattcacaggcattctctccggcacaagaatggtggatgcgatggcgcattctctcgtttccctcatccctgatgccatgggcccgcatctgccgttgatcactgcgattgccagcatgcctttcacctttttcatgtcaaatgacgccttttacttcggtgtgcttcccatcatcgccgaagccgcttccgcttacggaatagacgccgctgaaatcggaagagcctccttgctgggccagccggtgcatctgctcagcccgcttgtgccatccacctatctattggtcggaatggcgggcgtcagctttggcgatcatcaaaaattcactattaaatgggccgtggggacaacgattgtgatgacgattgcggcgcttttgattgggattatttcgttttaattaaaaaaggatttccgccagcggaaatccttttctgtacattatttttttgtatagcgcacccagtcataatgagcgtatagcggatttacaccattgtaggaaccgagccagtcatcgacacctatcccattccacaagttcatcatgatctttcccgggtttgtcgggatttggcttgtcgcagtatgttttaattgcccatcgacataccatttaatagagtttggctgccaatcgaacgcatacgtatgataggcattggccgcgtcaaatccgagatccgcaaccttctcatggtttcccgcgccatttgtataatagttaaattgaacctttgtcgtgtcttttcctaaaaattcgatatcaatctcatcccaaggagtgccatccgttggacctgtataagtgaagaacgatgaaacgatccctgtgtttttagccggtttcattctgacttcataaagtccgtagccataggtttgaacggagcggttctccccgcagtcaaacttgttataagacgggcttgtcagcgccaaacgcatttcacctgatgacgtcattgatacattatttgcacgccacgtgcagttgaacatatctccattggaataaccatttgctttttgccataatccggagttatagctgttaaaaggttcaaaaaacgatccgcctgtttgagctgatgcagtagaagtgatcgcacacaaactcaaaaacaatccagtgacaagaagcagcagcactcgtttcatacgataaaacatgtcggcattcccctttctttgaaaacgatttctttatcgatcatacatgattctgttaaaaggggacatcggtcagaataatgataataatgaatcttaaaaaaacctaaattaccatcagcacaaacagaaatgatcagcgctcattgtaatttaggttttgcctgcttatcagtaacaatcctaacaagatcatatgtgaatgtaaaaaagtgaatacaagaaaacaaaaatgccaacgctttcattatgcttatttgactaccctttctatgtgaatcgttaaatacagcagctcgtcactggtgagcttgtgcttatacgccctctcaatgcatgtttggattttcttcgtgcattcatacgcccgatggtacttttctttcactgtctccagcaaaaaatcgtcctggctttccatatgtgtgccgttaaaaagacgctgcgcgaaaaactttaagtgggtgacaaaccgataatagtgaagtgattcctcgttgaagtcaatcttaaaatggtattttacgattctcaaaatctcttgcatgacttttgtaatgttgatgatattgggcatctcttcattcagctcggcattgacaatatgcagcgcaataaagcctgcttcatcctccggcagagacacgccagtcttgttttttaccatggccaacgcttgtttgccgattgcaaattcgtctttgtacagccgtttcgtttcccacagtaaggcatttttgatatccagcccttttttattgcgctggatcgcaaagttaatatggtcggtcagcgacacatagatgctgtcattgagctttttgccgagctgtaatttcgcatagctgataatctcttcggatacttccatacattcgatcgggatatcatacaaaagggttttgaacttttcggatacatctttgttatcgagcgtgaacactttctcaatgcgggcttcatctaccgggtctcccgttttcttttgaaaagcaatgccccggcccatgataaccaattcctgattgccttctttgagcacactgacaacattattattaatgactttcgcaatcttcaattctgtctccctcccgcctgaccatttacctgctacaccttgattttacatcctttttgaactaggtcaatatctccaggtcaatcagaaaacgccgttcagaaatcattgtccaacgatgaggcagcggcgcatataatgcagagaaccggtttttgggaaggagcgtgtgtgatgaaacggttttcgaaagaagaaagcagctggatgctgtatgattgggccaattcagcttattcggtcattattatgacggcggtattccccttgttttttaaagccgcggcggcggaaaacggtgtcagcgcggcggattctaccgcttatttgggctatacgattgccgccgcgacttttattttggcgatgctcggccccgtcttaggaacgattgccgactacaaaggatgcaagaaacggttttttgccttcttttttctgatcggtgtggcgggcaccgccgcgctggctttgattcccggcgaatcttggatgctgttattaatttgttatacgatttccacgatcggctttgccgggtctaatgtgttttatgatgcgtttctcgttgatgtggccgcaaaggagcggatgaatatggtgtccgccagaggatttgggctgggctatatcggcagtacgatcccttttctcctcagcattgccgtgattctttcagcacaagcggaggtgattccgctgtccgcccaggctgccggccgcattgcctttttgattacggcggcatggtgggggctgttttcgatcccgctccttctccgcgtccgccagcgctattatatcgagagggagccgcggcttgtaatcagcagttttaaacggttggccggcacgctgaagcagatcaggaagcaccgggcggtgtttttgtttctgctcgcctatttcttctatatcgacggggtcggcaccatcattacaatgtccacgtcatacggggctgacctcggcatcagcgcggcaaatctgctgattgttttatttgtcactcaggtcgtcgccgcgcctttttcgattttgtatgggcggctggccgaacggtttaagggaaaaacgatgctttatgccggaatcggcgtgtatatgattgtctgcacgtatgcttattttatggattccgcttttgacttctggattttggctatgcttgtcgccacttcccaaggaggtattcaggcgctgagccgctcttactttgcaaagcttgtccccaaacagaacgccaatgagtttttcggcttttataatatcttcggcaagttcgcttcgattatcggcccgcttttgattgccgtcaccgcccagctgaccggaaattcgtcagccgccgtgttcagcctgatcattttgtttgtaatcgggattggcatccttgcgtttgtgcccgaggagacggcgtaaaaaaagcctgcgcgcggcaggctttcttttttatttcttagctttatggactttcagttttttgcctttgaccgtcgtatttttcatgatgtcaagaacgtgcgggcctttgccgttcagaatctcgacgtacgatgcgttgtccagaatcgtgataatcccgatatcatcggctgaaacgccgtcgattttcgcaatcgttccgacaaaatcgaccgctctgagttttttctttttcccgccgttaaagtacagcttcatgatgtctttgtttaactgttcgcttttgtctgttttgacatcggggcgggcgttcagtttttccgcaaaagccgctttccgttccgctgtttctttctcagacggcgcctcccgcttttggatgcggaaaccgatatatgtctcaatgtcattcaggaaccgcgattcagacggcgtcacaaacgtaacggcccgtccgcggtgtccggcgcgccccgttctgccggtgcggtgcacatagctttctttttcaagcggaatatcataattgatgacgaggctgatgttttcaatatcaattcctctggcggcaacgtcggtcgcaatgagatagcggaactcgccgcgtttgaattcattcatgacgtcaaagcggtcttcctgcaccatgccgccgtgaattttatcgcaagggtagcccagcctgtccagctcatcggttaactggatgactctttcttttgtccggcagaatataatgcagctgtccgggttttcggtgatcaggacatcacgcagcaaagatgttttgtcctcttcttctgttctggtgacaaaatgctcaatgtcttttgtcgtcaggccttccgcttttacttcaatcaattcagggtctttcatatatgtgcggctcagcttctcgacgtcatccggcagcgtcgctgaaaacagcatggtgactctgtttttcggcagatgctgaatgatggcttccacctgttcaataaatcccatattcagcatttcatccgcttcgtcaatcactacatacgccagccgttcaagcggcagcgtccctttttctatatgatcaagcacacgccccggcgttccggcaacgacgtggcttttttgcttcagttcggttttctgtttgtcaaaagaagcttttccgaaaaccgccgtggcttttatccgtttgaaacggccgatattcgtgatatcttctttaatctgcgccgcaagctcgcgggtcggcgttaaaatcagcgcctgcggtttgttttcctcccattccgcaagctcgcagatcggaatgccgaaagctgcggttttgccgctgcccgtctgcgatttgacaacgaggtcttttttttgcagcgcggcggggatgacgcgccgctgcacttcagtcggctcggtgtattgcaagccattcagcgcccgtcggatttcggggctgatcgcatattcattaaactcattcatgactaaactccttctctgtccggctcccctcattatacgcgaaatgccgccgctttaccctgacgttttgccgggccattcgtgggactgctttttcttcatgtcaagcacgacccatttggcgcaataaaagctcatgcttccttccccgtcatcgacatagtagcggatcgattcccagccgccgtcgaccgggctgatatccagatggatgtcggtgatgctttcaagatcatccagccgggcagccctcacaccctcaaaacgcagcacggcatcatactgcccatcagtcagattcagctcaaacaccgggattttatcataatactcgttatacccggtatagaacgtaaactccgtcaattcaaaacaacccggcgaatccggccccaacagaactgctttctcatgtttgtgccactccattttgtgcctcctttttttcagctgaattggcatgtctgactcaaatgaatttttcttacaaacccccatgaatttctttatatgactgcacccaatcttttaattcttcaatcgtatgcagatacgaatcaggcgaatctttcagatcaaacccgctcaaatacacgagcatgtaccaaacggtttcgtcctcaaccgccggatcatctgcagtcacgtactcacacgcccaatccgacacttcttccctcgccgcttgaccgttcaggatcagaccagcctttttcagacattctgctcttgtgggttctttcacgtcaaaatcctgcctttcatttcttgtttaaaatgctgaccaacagccctctcacccgttcatgccgcccgatttcccggctgagctccggataatccgttaaagcgtatttcagctgcgcatattgcggataaagctcaaaaaaggatttatataaggctttacgctggcgcttaggcatttgtttattcgccaacacaaaatctaagctgccgcagataagcgcgaaatactcataaaaatcccccgcgcaggcagccccctcaaagtcttcttcgaatctccctgtatctgaaggcagcggatcctctaattcttttttgtataatttcaggtttcggatgacgtcatcatttaaagaatatctgttggatcttaacatctcagaatcaatcggatagcgcctgattcgtcgatgatcgtaaacgaaagcccgtcattctgatgccgtccgagatacagatgcccgcagttatcaaaatgacaaaaacatccttttactgattcttcgactatcttattcatttttattttcatgtaattgccccttgtatttataatgcgccgcgagctttttttgaaattcatccgaaacaatctgatccgggaatacaacagatacccagtctaaaacacggtcgtctaagggcctccatgatcctaacgtttttcccgcaatctcctgatcaatacctagaatacagatttcaaaatctctctctccgtaaatcgcccactttaaagtcggtgaagcccatacgacgcgggatgcaatattcattatgctgtcatttttactgtgctttggataatcagttaagattgaaagatattcatcttcggttatatttaaaggaatctttaaccagttaaaatatccgaattcctcgtaaaaccgattcatatcatccggttgtgtcagaacagccattaagataaattcatcgtgatgatgatgcgccaaacttttgagcatttcccagccttcttcagacaagacccagtggaattcttcaaatagataataatgttttcgttgtttaaaaacttgttcgggcaacgctttgtcttcatgaaataaggaatatattcgaaattgaaagactgccgattcctttgtgttctttataaaaaagggatgcatcttgtacctcttttcggcggtttacacacaagctcacagccgtattctgtgtgaaataaacagacagaaaatgagaaggacggctccactaaaataaagctgttagaaagcagccggccttcaaaatctataaaatccatgagacagtgcagatgacttgcacaatccttcagcgcacatttgatagcaccgacttcattactatacggatgaaacagataaacaatatcattcatccgttcaacccccgtatccgcaatgttttctaaaataagcgatatggctgtctccttgtcgcttatatcaacttcacgcactgcacttgggaaagaattcgataatatagtctcaaatatctgcctgctttgttctgcctcagctaattgataaacaaaccctgattcttcacaagatcttagcgagtcacgcacctgtttcattaaaaaatgcctcttgttttcctcaagcttgtcaattaacttttctctcatcactgaacacttccttacaggatattttcattctgccggcatgtatgctgcatagaagtaatcaatacttcaccagatataaatcgttatcatgaaagataaacatgcggtcctgtacggctctgtacgttgtttctccttttctatcaataccgtgtatcatgacgtcagtctctgataagcctttgttctcttcatgaaatgcaaatagggtatcctcgtgactctgaatcagcagcaccctttttttcgaaacggatagctgatcacaataggagtattgatcgccgtccagcacatattctgcaacagtacgaattctgtcccgtccaatctgataatgcccgatgatacagcaatcctctccctcgaaacatacatacaaatcagatttgatcgattgtacggcatagcactcatgcatcatttctttaaaatcgtctttaaaataaaacgttctgtcttctgcatgaaaagcaaatatcgctttcccttgagggtttctctcatcatacataccctcgtccgttaatccgatccatagtaatccatcctcacccagatgaaatacattggcgcttaatagaaaagaacaaatcggattgattttattactgtttacgcagcatacggctaattgacacgtatgattttcaggtaaacgatcacgatagtgtcatcatacgaatcaaccagatagaaatgggcatcttcagaaaatccgtgtaactcttttttgattaaaagagagctgcctttcataacctccaatattactttgtgatcatgcaccgacacaataaacacttgatcatcccgacccgcattgaaatagatgatgtgctctcttttatatgacccaacccgctccgcggtaagttctaacatcagcaacactccgttgattaggaatctggaatttatattaaattaatcaatgatatataaatctgctgcatcgtattcaaaccaaatgattttttcattattttcagtagttacatcaaccttttgagtgttcaggttcatataggacttatttttggcagggtttgctattataactacaaagtcattgatcgatgctaaaaaatataattcatctaataagtgatctgccatcaattgttctttggttagggcacattcaatatgaatgaactttttcgaaacagtattcatatgtatcattttcttttcaaccttcttcttccattcttcaataaaagaagggaatgccattacttctattagagctgtttcgaactctaagtcattcattaattgagaaaaagtatctttactcactagatcacatgaataaatcgaattgtatttaagcggattaatcacattcagattccctatagccctcaatgattctttttgtaaatttaaaggagtgttcatgtttacctccgtaaacggtttcgttatgtaagaaaagagaggctgggaacctctcttatttgtttatttatgatttcggatgatacgcataaaatgattggtcgtcaaagcgaactgtttcagcttctacagcaatcagcatgctgttcatatttataagaaaattagcatttgattgatactccggaattacagcatttgatagattaccgattccttccgggtggtaactcatctcaaatacttgccaattgtattcttccggatctattttttctaatctcatatcaccaatatctgcactaaaataaacagatgctgcattttgaaaaagaatgttatgcgtacattcggctttattttcaacgacctgaatcttaagtgaaagctcttttttaaacacatgaaagtcaaaatgaaggacagcgcaccctccgtctatataatctacccattcattaattgtcttgtacaccgtttatctccctaataaagttttggagtctttgagatctgattttaaagtcttcacgaaaatttctagcttttcttcattacagttcaatttatagaaggttgtatttgaatgattctccataaatctaatgataaatctgtaatgttcgttttctttatcaatacttaggataaaaaatggttcaattgtttctaaacgtatcctgtcttgattgcctgctgataatgcttcaatatctgatatcagcattttatattcactttctaataaaacggcagagtaatcgcgggcgattgctttattatgttccaacagttcaaacgttgttgagataaatggatcatccttcgcctcatgataccttctcggtgttatttcaagttccagacaaccgtctccgattttggccatgctgtctcctcgttctctacttaatagctttaatttagtagtaaatgatttgaatgacgctctggaattcaagctaagtttaaatcgattgtcaccttttactgtctcagttctaatcacctacccacttattatctataattttttttaaaaagcctgttaaccaaaagatgatcaacaggctcatctattttttatttaatgccattatttaataatgtttataatattttccttatgtctagatcctattctgattgtctcggaatctgttatttctatatgataaagaacataatccagtaaatctttaataattgttttctctgctaaaggggctccatttaatatatcttttaactcaacatctttttccaataagattatattttcatgcgcaattattgtatttttgtactcttctgctgaggtttttataaatgagatttttttattaaacaaagtatttgtttttaagctcgctgagaatatacaagtatcactatctttatttgaaacagagtaagaatacattgcgtattgtttattttccatattttttaatataacaaatattaaatcctctattgttttatactctttttcaaccgaatcatagtcattgagagttgatatttcataaaaatagtacatttaattctctccttctatcttttatacactgtaaatcgtatgagatagaataagttccttcgtcgtattggtagcctgttagcggtagcgcttgtcttttacttcgtctcagcgatatgttattcccacgtgttccgtgtgtagtttggtttttatcatataagataagagaggttggtaacctctctaaatctcttctctaaaaataactaaaagaagccataaattactcttttaatatttttattatatctgtagcttctaaaaacaattgatttatcttatcttggatttcttttgctatttcctcttcactttctaaatctgttaaatatcccactttccccgaaaacaaccttctttcacaaatccatatatctaaatggtctatacaatagccatcttcattatcatgaaagtcggtaccatccaaataagctacagaaaaaaatattaatgagttataactattctcaaaacaatctgagggctgtacttcgtttcctattactttttcgtctccgactcttccaaaagcagcttcaattttcaatcccatttttctaaacttttcttgattgttttctattttgtttaatgcgattcgttcaaattgtttttctatttgtaagatttctttttgtgtaatagagttgagattgatttttttcatattatgtctcgttcagcattcaaaacatttactactgtcagtatctgtacagtaagtatcctttaacattaattgcaagaatgtaaggaatcagtcttttacaattcattctttatgatttcttccattgacattcctgcaaaatatttatagagaatagattctacagatgaatgtccaaatatacctaatgggttagggatgtccttgcctgttttctcatctgcctctgctaattcatcttctgatgcaaatgaatcgccttcacttatgagatatttaccgtcttcatataaaacaaatttcaattgagaatgactgtttttctctattatctcttgaggcatcttggatattactttccaatctccttgcagaaaacctgtgtgcccggtattagccgcaaatattttcttattttcttctttcattagacgaatgatttcttctctgctaagtgtattttcagtgaaaatattataatactgaataagaatgtcatcgtctttattttttgatagatcaccttcaatgacccaagcataagtatacttcccgatcttatccaaaggtatttgaataacagctcccggtgttactttagctattggtttcactttcctggtcgttgcctttatttctactattcgcttatcaactaactctgtgaaagaagaatctccatttgtattcattacggtaactaaagttgctaagaattcttctaatatcggttctctatccagctccctcttatataattcacaaaatttctctacagcatcaaaacatatatctaagccttcatcactaagtaaaactttcttgtttttatattcttcttcccaatatcccaatagaacggccttctttcttttataccgcttcttaagattatatttcctcggactttattagatatattagtagtatttaaatttttaatagtattcctttagcttaccagttctcgaagaatcccatggaaggtatcagaaactacttaacagaaaaaggttgttgttaatatcaatccctgcacatttatctttatatgatgctacatgtgtaaaactgatactttctgcagtattctcatccattattatttgttttgtatagctttgcatattatttgtcttcagagctatctcaatattataagaatcctcatcacgaatgaaaaaataactagatgtttcggatattacgcatgaagcacactctatttcaatctcaattcgttccaatgtttctccaagaaagtttaatttttgcaagtaattttcactcattgatctgtaatacaaatagattgcatctttatctacaaatgtagaatagtactggtcaacaatatatggattaacgtcacgagcacataattcatatagtccatttttaaaaacgaatttattaattcctttcgtgcttaattcggaatcaacgcaagaaaatatgcccgcttcatcatatccgacccatagattcttattttgatctattatcattgaattaacgtatcttccagcataaaaagattggtagaaacctttaagtggactccacaaatatatgttgggatcaacatttcgaactccgtcctcgtactctttatctattaaaagtaaaaaagtatcgctaactttttgcacgtttataacttgttcatttgtttgtatgctaaagctattcaggaattgtccattcgtattacaatacagatcaatttgattaatatatttgttgccataatcaatttctttttttgttaggacaattatttctgattcagtcaacgttagcagaactgagtcttcctcatttacttttacattcaaatctctaaattttaattcatccatggatgacatcctctcctgtatctgaaaaggaagacagatagaatctgtctctccttttataaatttcaataaggatagcttgttacaacataccttccggacttaacaacctttacagtataagtatgccgaccattcgtttttcttcctataggctttttaaactttttataatgtactgtcctaccatctttctgagtgtatgcaggtttagttctagctgttgcctttgttgttcttctaagagttttagcacttctaaacttgcttttcggttggccatttggcattcgggcttttgacttaggtccatgatcttttttgatatgtttccaattgaagtttttaccagattttacaaacctataaacccttttagcacccttaaataacttcccaggaccaaagttcgaagccgcagcccaggctgcacctctccatcctttacctgatttatatgctttatatccatcataggctgcaaatccggcatttaccacaagccacacccaatgcccatccggatcgacgttcatgactgggttgttgtttccgtatgcatacccattctgatccagcgaatcgccgtcactgcccgggtctgggtctagtgataagaatacgccgtttcttggctcgtagtagcgggccatgagatagtacaggccggtttcttcgtcgtattggtagcctgcgtagcggtagcggttgtcttttacttcgtcgctcgcttcggtttttgtcggatttccccatgcatcgtattgatatttggcaacggtttttccggtgctgtctgagatggcgatgacgtcaccgtgtgcgttgtagtgatagaaatatttcttgccgttctctgtataggataacagctggccgctgtcaccgtacgtgtatgatttagtgacgttgttgtcggcgtctgtttcatacaggacattcaagctgtctccgtcgtagaagtagttcgtgacgtttccgttgacggttttttggattctgtttcctttttcatcgtatttgtatgttgcgaacggcttgtcttcgccttttttcgtgacggcggtcaggttgtcttccgcgtcccacgtatatgtgtatttgccgtcggatgtgcggttgccgtttttatcgtaggacaggtcttcgtcattcaccttcgtcagctggttcatgatgttgaaggatgcgttgactgatttgcttgcgccgtccttggtggcggtgacgtttgtccggttgccgaagccgtcgtacgtatattgaatgacggtgccgtcttcatgagtttctttgacgagctggttgagcttgccgtattcgtactgcacctttccgcccgctgagctgtcgatgaccgtgcggttgccgttggcgtcgtattcatagctttcccggaagatgctgccgccgtttttcgctccgatatgaagagagctgacaagattccgctcatcatatgagaagctcgtgccgacttcatttccgctgatgaatgtctggacattgccgttttcatcataatcaaatgtataggctgaagtgccgtctttcatttcaatcatttgatcaagtttgttgtacgtaaagctgtttgttcctttttggccgccgtggctccatgagaaagttttcagcttatccgaatcagccggatacgtccagctttggctgccgccgcggtcggttaattcggtcaggcggtttttgttgtcaaaggtgcgttttttcgttgtattttgttctttgtttgtgaccgatgtttcattgccgtttttgtcataggtaaagttgtatttttcagtgccgttatacgcttttgacttaacccggtcggtgccgtcataggtcagcgacacttcattgccgttggcggaaacggttttcgtcaagttgctgttggcgtcatattcactcttcagtacattgccgagcgggtcggttgttttgacgagcttgcccatgacgtcatattcatattgataggtctggtctgcgccggcccgaatcgtttttgtcagctcatttccttccttgtcatagctgtgaaggatggatgtgccgtttgacagggtcagctttgtcagctggtcggcctgatcgtattcgtaggcggttgtttcgcctttcgcgtcggtttcagacattttctttccagtctcgtcatatgaagcagtgcttgcataccctagttcgtcttcttcttttgtgacgtagtttgctttttcgtcataggtgtttttcgtcaggatgcttccttcgattaaacggatatcatcaaaccacgccgttcctgtggcgcttttttggaacagaatgctgagttcgattttattgatcggctttgttttcggaatgactgccgccgcccggttccattcctgtgtcccctgcgggaatttggcggtgtagacgcccgttgtgccgtccgcataagtgacgttagcctgaagagcgtaatcattgtcgttcgtaaattttacgccgtcagccttggacatccctgtcagcgtgatatataccggcttatcgtccgcgctttggcctaatgtaacggtttgttttgcggccgcattggcttgtgatgcatttgtgcgggacgcttttaatgagctgtcatcatcgaagccttcatcaaggtcagcggcggctccgcttgtgctccagccatctgttttggccgtgaaactgctgttttgcaccgggttatagcttgaagagacttcgcctttttccagctgaacctgatcaaaccacgcttttcctttaccgtccttgtcgttatgatccacttccatatagacgatggcttttcctgcattggccggtgttgtaaaggtgatctgccgtttcgtccagtcattctttccggctaatgcgcctgattcattgtgaatccattgaatgcgtttttggtctttgtcacgcagatcaatgttgaaatacgctctcgccttcgtcagatccgttttgatctggccgctgagtgtatacgtcgtattcggctcaagctgcacttcctgcgttgcggacgcatggccgtgctctgttccggctgaagcggattgtgacgagatctccaatgctttttgtccggacagcgcgccgcttcttgcttttacagatgcaatacttccgttgtctctcgtagcggtgagattccagccaagctttgttccttcaaagctgccgtctttcagcaggctcgccgaagctgccagctctttgcttgattgaatgagatttccgtatttgtcatacacggcggcggatgaggattttccgctttgatccgtctcagaaacggcatcaagcccgtcgtacgcaatatcagtgacgttcccctcggtgtccttcattttcgttacgtcattgtttttgttgtactgatacgtttcggtgccgtagttgtcttttacggctgtgacgttgccgtctttatcatattgatagctttctgtcgctttgcccgcatccgcgtcgttcggatcggtgtcctgaatgacgttgttgccttcgtatacggtgttggtcgtgattttcagcccttcggcatcatcgatcatctgaatcgggttgcccgcttcgttatagccgtactgcactttgcggccgttcggctgcgtcatgagcagcgtttttttgtccgcgtcatagctgtagtcgtacgtttcttttttcgcattgacggctttggccagacggtggccgctgtattggtattcagtgaacagcggtttgtcatccgtgctgtttgcggaatactgcttgacgaggcgcccttcggcatcatagtcgtagcttgtgacgctgccgtcagtatccgtcacctttttgagaaggtctttgtcatatgaatatgaaatctttttgtttttcggccctgtaagagatgtgacatggccgttttcatcataggtaaatgtcagcttgcgccctgatgcgtctgttatggcggtcagctgattgctgtcgttatattcgtatacggttgtgttgttgtgtccgtcaacgattttttggagcttgccgccttttttgctgaaataagcgttcgtctgatcttttgtttttaatacaaattggtcgcttgtttccgccagttcgagataaacgcccgtcggcggctgatacgtgccgtcagattttttcgtgaagacatgtgttgtcgcgtcctcatcaatataaacggctctgccgtcttcagaaaggatcgacgtttccgcatcggcataccagccttggccgaacatatggtcagagctgtcaaggctgttgaatgtccgggagagcccgagccccggcccgcgtccgtcgattgacatatcttcctcattgacgatgacatttcccgtcgcgccgttcagctgtccgtccggaatgtcgataatagaccagaattcttccgttccgaggaattccgccccttcatggaaaacagggttaaaaggtgccgtcggtatgctgtcaccgtttgcgtcataggcggtcagcgtgaaggaatagttcttcttccctttgtaattgccgtttgcgttttcgtaaacaggtgaagggtcaagcgccagttcgccgccctttccgtccgtgtgaagctggaatcttcccgctttcacttcatcagctgacggccagatgcgtttgttttgggtcgtccaatgatcggtatccccgacatcgaatgattgatagtcttttccgttgtaaatgttgattttgtagcctttggcgtttttgaccttatcccatatgagattgacataacccgtttggctcgatttcgtgttcgtatagacatagcctgtcaggtttttcggctttgcgatatcaggcagcgccggactcgcttccggtgaggcgatcgcttctccgtctttgttataagcaatgactttaaatccgtaggttttccggttcgcatctcctccggcgtttttataaacggggcccgggttgatcggcaattccgcgccttttttgtctttcaggtgaagcgcatattttccggcgctgatttccgcctttgtcggccagatgttttgatcttttgtggaccaggatgttttatttccgaggtcaagcgtttcaaagcctttgccgttaaagacttgcattttatacccggctgcgcctgatacggctttccaggaaagatcaaaccagcctgtggcgttgttgttattaaagcctttcgtgctcggtttctgaactcttccaatattcggaatgacgggcttggcggccgcagacatggcgccttctccctggtcaaacaccgcgctgaccgcgacccagtaatttttacttgccggatagctgccgccggagtttttatagaccggcgaaggattaagcgctaattcacttccgccttttccgtctgtatgcagcttatatttgccggagtcgatttccgcttttgtcggccagatgttttttccttttgtgctccaagaggttgcattgccgaccggaatggcctgatattctttcccgttataaagccagactttatagcttttggcgccttcagcttttttccagctgatattgaaaaatcctgtcgaatctccgttatgatacgctttgacagacggcgtgtccgccttcggaatcgtgtatgtcacttcaatgtatggttttttagcagagtttgctgatgacatcagcttcttccaatactcttttccgtttccgtttgtgtgaagcttaaagccgtaattggcgccgccgctgttccacgacttgactgcggaggtgacatcgaagcttgcccattggcctttatagacctcggctttgccgatgtttttggagcccggcttgttcttccacgtaatcttggcattgtcgtaattgctgttaacggtgtcgagccaaagccccgtcgcttttgatccgtaataggagtgggctgtgtacgctttgagcgtcgctttcgtcaccgtcatgtttttgatcggctttagattatcaaacttcataaaagcgtagttcgttccggttgtgccgtcataatatccagttttcagcacgtacgctttcaatccggcgtcccatttctgcgaagcggcagagtagtttgtcgtcgggtacgcgctcatgacaaaggtatcggatgacacagatactgatgttgaagggtcaatagataccggataaacccgcttgggatctttcagccatttttcatcggccgttacatggagcaagtagccttcgctgtttttttcaagcttgaagctgacattttctgacctgttgacttcacctgacttttcgtcgagatctgagtcggtcataaagggcttcggcacggtgtagacgacattgtctttatcatcagaaaacgcgatagagccgtcttcctgttctttagcctgaaggtcggttttgatttgaaaggtgaaggaattgtagccttcatatttgtgaagcacaaggtcttcttttatgttttcgttaaatgtgtaggtttgtaaatcaattgcaggaaacacttgctgatacgtaagctcgttgctgtcttcccttacttttgctgaggcatctgtcggagtaattgcagcctgatcggggccttttgcgccggttaatgagtatgtgagcttatgatcattgtgttcaaatgtagcgtataatccgtttttcatttgcttcagaaaatcggaattcagcactgtattttccgttccgacttcctttgagccggttttcaattcaggagaaacgtcttcccagtccgcattggcggtttctttcgtatgaatggggtctgtgtagatttcctgtttgtacacaccctcgccttcatagtaaagctttgaattctcagttctttcagacgtgatctcaccgtcttgattaatatctttttgatcaaaaggcatctgctcagatgctttttccgccggaagatctttttccgggtctgcagccggaatggcggcggttttcgcttgatcttgtttttcacgcgtttctgccgcaaacacatcggcaggcgcaatggaaattatcagcgttgccgcaagagtgccggccagccattttttccacttgttcttttttcctattttcataggttctcctccttcttttgtaatataggcttaacaatagtaatattattgaaattgtttatcaatattttcctaggtatttaaggttattttaaggattatagggattttgaaccttttattcatataaaaaaaccgccggctgccggcggtttttcgtattatggatagcggagatttgtattttgcgctcccgcgtaagattgggcgaagtttttggcgtcctgggctgagagggtgccgtagctgtaatttgatctcggattccagctggtgcgcggtgatttcggggccttgagcgacgggaatgaaccggtgtcggtgaattgggccgtcccgtagtcgtctatcattccgcctttttcatttccgttaccgaaatagttggcttctgagaagacagtcgcgtttgtatgaatggtgaatcctaaattgaaattggtcacatagttgtttttcgcgtgaaaatagccgtatctcatcaggcccggtgaacgcacatagacgttattaaaatagttgttggtgatcgtcatatgcggatagccgatataattgcgtccttcgttatcatcattcggataaccgagaatcaggccgtacagatggtctgtgaatttagagttagacagcgtcacaaaatccgctttggcgccgacatacagaagctttcccaaatcactgtggctgttcggattgtagctgtgtccttcaaaccacacgtggtcaatccagtaattctgtccgttcgctatgtacatcggaatgtcgttgttgcccgtaatggcggcactatggctgataatgagatttttgaaaatcacattgtttgagccggagccggtggtcagatagatgttggtcagcctgtggctggtataagagccgacgatggttttattggcgccgactgtcacgacggctttacccggggaagaaatatcacttgtgatgacgatggttttgcgatccgttccgcccgcattatttttcaaatcattgagattgctgacgtagacgacggggccgccctggccgcccgatacggcggattttgcttttccgttatgatccttcgcattgcccgcgaatccggtaagtccctgcatcacatccggataagccgctgccgcttctgcctgctttgatgcggaacatacgatggccagacaaagcgcaaagccgagtgcagccaagaaagcgagatgacgcgtcttctttatcatgcccttcactcctttaatttcttaaattgtaaacacaagaagtattatacaattactatcctctttttccatgatctgtttgtctgctttttcgttatggctgaaaagccccaaaataaaaaaagcagccggtacggccgcctatatacgggtgctgtctgcctgagtttccgccggcacggctttttgctttcgaatcagggacagcgccattcccgcaaaaatcaatacaatccccaaagattgataaaggtcggggcgaaatcccgtaaatacggtgtcaagcacaatcgccaccgccggatcaagaaatacgatgattgaaataaaccgggtggataaaaaccgcaagctgtcaaaaaagagcaaatacacaattcccgtatggatgataccggtcgacacaatcatgatccagttcacatgcgacaaatcagaaaaagcgccgaaacggacgaacggaagaagaatgataacgcccaatccggtctgcaaacaggtgacggcgtatgggctgaggctgttgatgcctttcccggccagtgtcgtaaaagcataaaaaagagcggccagcacggcccaaataatacccgatcccatcagctgagaaaatgatgtacttccgttgatgccggaaatcagggcggtgcccagaaaacaaattacgatggaagtgacggacaccatatgcagtttctcccggtatataaggctccccagaagaaggacgagaaccggagccagatgataaacggaaatcgctatcgtcactgatgtctcctcaaacgatttaaataaaaacacccagttcagcacgagaaaaaatccgcaggccagtgtctgcagcacctcccgccggttccattgttcggtgcggtaccgtccggaaccaaaccagcaaacgcccagaaacaatgaggcgcacagacatctcacaaagaccagttcaattgaaggcacattcgtatgttctgagaaaaagccgattgatccgaaaatgaccatggaaatgaccattttgatgacggcatttgatgtttgttcagcttgcattgatttgcttcccccatatcattgactgtttattcagacaaatactaacagccattttacttgattcagaggaagatttcaccctatttttcgaaagccggcggtcttttctcatgaaaaaagccctgcatcagcagggccttctgtttaatgaacgatcagtacaggacaaggagacaattgtgagaccttatggctcacgcttccgagcatcatttctttaaatccgctgattccgcggcttccgacgacaatcagattgaaatgctgttctttcgctatgtttaaaatttgatgcgcaggttcgccttggacgtacaggctttccgcgtttactccgctttctgccgctttctgcttggcatcttccagaatggctgctcctttttgctcgacttcatgtttgatgtcttcaatgaagttttccggaacatagacaatcccggttaaagctgatgtggagacaacggcttcacgtcccgcatagagaatggtgagttcagcctgctgttctttcgccagatggatcgctgcgtccagggctttattgctcatgtctgaaccgtctactgctgcaagaatttttttaaacatatgaatcccgcctttctgcttttattgtcctcctctctttgctgaatgtcaattttgccggctttctccggaacattgcgcttacagactttctccgtttgtggcgatgacgtctttataccaataaaaacttttctttttctttctttcaaacgtgccttttccgtcattgccgcggtcgacatagatatagccgtagcgttttttcatttctgccgttgaggcgctgacgaggtcaatcggcccccacgacgtgtagccgatcaggtcgacgccgtcttcaatcgcctctcttgcctctattaaatgatcacgcagataattgatgcggtagtcatcctgaatggttccgtcctcctccggctgatcaaccgcgccgagtccgttttcgacgatgaagagcggtttctgataacggtcgtacagcgtgtttaaggtgatgcgcaagcccttcggatcaatctgccagccccattcggaagatttcaggtacgggtttttcacgccgccgagaagatttcccttagattgcgccagatcctcaggcgccgtgctggccgtcatcgacatgtagtagctgaagccgatgtaatccaccgtatgttctttcaggagcgcctcgtctccttccttcatctcgatcgtaattccgttttctttaaagaagcgtttcatatagcccggatagctgcccctcgcctgtacatcagaaaagaacagcgtgctccgctctttttgcaaagccgcatatacatcctccggcttcggcgtcatcggatacgtcgtcgttgcggcgatcatgcagccgatctgtgaatccgggatgatctcatggcctgcttttaccgccagcgcgctcgccacaaattgatggtgggccgcttggtacatcgtgttttgtttattttcgccttcccggaatataaggccgccgcctgtaaacggagcgtgaagaacgacgttgatctcattgaaggtcatccaatatttcaccttgtctttataacgggtgaaaaccgtgcgggcgtaccgctcatagaaatcgaccgtttggcggtttctccagccgccgtagtttttcacaagaccgagcggcatctcatagtgagaaatcgtgacgaccggttcgatctgatgttttctcaattcgtcaaacaaacggtcgtaaaattgcagcccttcttcgttcggttctgtttcatcaccgtttggaaagattctcgtccacgcaatggaggtgcggaacgctttaaagcccatctccgcaaacagggcgatatcctcttgatagcggtgataaaaatcaatcgcgtcgtgatacagattcagcgcatcgtctgtctcatgaaacggagacataatgccatccggggagacatccgccgtagaaagtcctttgcctccttctttataagctccttcaatctgattggcagccgttgcgccgccccataaaaaaccttccggaaatctcatgttttctccacctctttttcaggataacgccagaagcgcttcgttcggtttgaccattccgctttttttcacgtctgtaaatgaatattgatccgtattcgtaatgatgaccggcgtgatcacgtcaaaaccggcagcctttatctcgtcgatatcaaaagtaatcagcagatctcccggtgcgacagtatcgccttctttgacgtgcatctcaaaatgcctgccatccagccggacggtatcaatcccgatatgaatgagaacctcggctccccgggtgctcgtaatgccgatggcgtgcttggttttaaatacggctgtcaccctcccttctacgggagaaaccgccgcgccctcttcaggcagaatcgcaaaaccttttcccatcattccgccggaaaagacgctgtcgttcacttcgcttaatgctttcacttcgcctttaatcgggctgtgaatgatttctccgcctgccgtcacccccggcgcttcagacgctttgtcccgttcggactgtacatcctcaaacccgatcagcagtgccgccgcaataccggccgcaaatgagataaaaagcccgatcagcgcgtaaagaaatgtcggcccgataaagaccggaatgctcggcagaccggcgtttccgccgacaatgtaagaagcgacgcccgttacaccgtaaaaagctccgcctgccgcgccgccgattaatgctgccgcgaacggttttttcaatctcatgttaacgccgtacatcgcgggttcggtaatgcccatcaatgccgtaatgcccgtcgtaaacgccagcgatttgaaggttttgtttttggattttaagaaaaccgcaaatgacgcgccggcctgccccatattcgccaaaaacatcgcgggcagaatgtaatcatgtccgttttgggcgatgttattgatcatgatcggcacaagcgcataatgcataccggtcataataatgagggaaaatgtgccggcaagcagaatcatcgcggcaatgcccgcatgattgaacaaatcattgacgccgacagacaggtaattcccgagaatcgcgccgagcgggccgactgtgatcaaggtgacaggcacgacgatcacaagcgtaagcatcggaacggcaatcaatttcaaagaagaaggcgtgatgcggtcaattcctttctctacacaggacatcagccatatcgccagcaaaattgggataactgtcgatgaatacgtggcagcggttacaggaagaccgataaaggagatgcttttccctgctccaagcagggccgttaaatccggatgcagaatcgcacccgccacagcggccgccacgtacggattacatctgaattttctcgccgcgcttaccgcaagcaaaagcggcagaaaataaaacgcaccgtcaccgacagccgtgagaatgctgtgagtctggctcttctccgacaaccagccgaatgtcaccgctagcgcgacaagcccttttatcatgccggctccggcaatggccggcagaatcggtgtaaacacaccggaaatcacgtcaaatacggcactcagcacatttttcttctgcttcgaagttttgtttgcgctttcatgactgagcccgctgctctccatcaaagcctgatacaccttcggcacatgattgccgacaatgatctgaaattgcccgccgctgatatttgtccccatcacgccttccgtttgctccagcccgctccgatctgctttcgcattgtcatatagattaaaacgaagccgcgtcatgcaatggatgacactctgaacattctcctccccgccgacaagttgtaaaatctcttttgatattttatgatagtccatgagtatacctccttaaaaatgggggaactgccggacgaaaggtgcccgcctttctccggctttttttgttatgaaatcagcatcacctccgaaaaaagggtataaaaaaaacccaaactgcacagaacacgggggtctccccctgtctgacgcaatttaggttttgcctgcggtttgcagtaacaatccttggtgaatgatattgggttgatatgtatactttagcactggatttattgggtgtcaacgcttacatttaaatgttgctccaactaccatttaatgctttatttataaaataatttgtctatttctattgtaatcaaaaatctattcaatatccttatagaacaatttaatattaagtttttccataaatcagtgtggagtaaagaaagtacaatttataataatagtccgtagctgttctaatcactacggacttatagcaatttaaacttttagtcttcaacaacttgtaagaattcaaagttcatttcgttaatcaattcgttcatagctcgagcatttgtagaagaagcgttaaacttaggatcttctaaatacgaattttttaaagtatcagatatataagttagaaagttatctattccagctttttgttttaatctagatagtgagataccttctttaatcattttgtgaataacaccagaaagtatcattgctatagttatctgaaacctataccctttgcttgagacaccataaatttctttagaaaaggggtgctcaatcctttctccaatttcttcaattatttcattaaatgtattaaatctatttatgatctcatcatattccttttgtgattgttgtggattacatacttctagtttagatttatgtttcatatactcttcagcataaactgatgatttcgcgtatcctgtattaagtccattttcaagtatactcattatcacaaaaatattttcttgtattttcttctttttcaccctatctgttgttgcattgtaggccctctgaatcttactggatacctttttatcattcattttttgagcaaatttatttacaaaactattcaatttagaattataaacagcatgccgtatatcctgcggtgttaatggcttggtacctttattatatctactaaaaatctccaattctaattcaagaccagggaaatcagtaaaaacgatagaggcaagtttgtgcgataaaattttctctttaatttcaaattcgcaatcactaaatttttttccatttaactccaccattatatttagtcctgaaagtttaaattgattttctttaaacctatgaaatgctctcagtcgatgttgtccatctactacgtttaaaactttaactccctcataacgatcattagctaaaaaaacaggtggtattggtataccaagaagaattgactcaattaaagaactttcgtcagcaactgatgctctgtaatctctctgatagtcaggggcaattataattgaatcagtataatcaagtttgagttcatcatctagctcttcctctttatctagcttttgaagtttgtatccatttgtaatcatagatataatatcttttatagcgatatcctgaggtttataatttattttagctagcaagttactcaccatcccttacatattctaaaatactctttttcattattatatcttttgtaacagattccaattctggataaagtgttgtataacctattcccatagaataaagagaggacagtatatcttttttgcactctccgttgatcaccaatcttctaattatattttcatctttcaaatctgataaaggttggcagttatcttgaaaatatacaaaaagcccattttgtgcgttaattctttcatttaactttctagctttgaatgctatcggcccatcaaaattatctaaatttattctttcaccattagaaatattaattatatctgaacgtgatgcaaacttataattcaattctaaaggatttagaaaccatacttctgcatcacattcttcattttcatggaaggagttttcaacagcaaacattaaagaaactacatgtgaatgagtaaaatctaacaatttagttgggatgccgtaatgttgtgcataaaccatccactcatagtcatctctgatatctataggttgcttcacataattgtgacaattcactttaaactcatttaaaaaatattgaattgatcctctcgaatatttcctctttttgttattatccaaccttagggcaccaggtaacaattcgtattctttttcctgccctcttgataaaataaactctttaggtagcgcttctacaaattcagtaaattgacttagcctctcaataggttcatctaacaatataaatttcctcctattttttaacgtgtcatttattttatgttgtagtctaataaacttatcggctaactttcttttttatttagttgaatattacgtatctgtaaaggtttaactatataaaaaacgaatctctccttcagataataataaagaagagattcgttccttagagatttatatcatatattaaactttaattggttcacttcactccccaaacagcctccccatcaccgctcagcacactaaacgtcacaacttctttctctctcgctgagtcccattctttcaggaagacgccgccataatttgtgccgttcaggttaattcgggctttgctgctgtccgtttttgtccaggttccggtcatttccccggaaatggtgccgtcgttgttaagctggatgttttttggggttttgatcgtagctgtgatgtcttttccgtgctggatgagtttgtaggctccggatgcggcggccgccggaatgtgtgtatccggttctcccgcatagcggtatggcgctgcaacgggccatccgtctttgttcatgtacagctgatgtactctgacttcgtgctcttcgcctctgttcgggaaacgggtgtggaaaatgaggtatgatcgtttcgttttcccgtcgtaaaacacggagttgtgtcccggcgatacgtagcccgtgcctttttcagattgtgaggcgaagctgtagccgcccatgagtttgaccccgtacggttcaattgctttgtcgtcaaagaaactgccgtcttttcctttggcatcaagcatgttatggcctgcggcgtcatagtacggaccgtccggatttttagagcgcgccacacgcatatgataaccgccggctgcgtcaagtccgccgaatgacagatacagatagtaatatttcgtttccggattgtagctgatgtacgggccttcgattctgctgtgatttccgccgagcagtttttttccgtagccttggttcgggagcgggaaaccggttttcggattcatttccattatgaaaatcccgccggagtaagagccgtacaccatccagagcttgcctttatggtcaaaaaacgtttgcggatctacgacgttcgggtgaacgtttgcattatacgtcgtgccgtcttcgctttttccttccatgcccgatttcaaaaagatgcctttgtttttgtagggtccttcgatcttgtcactcacggcgacaccgagagcggatcgcggcgagtctcctttacaggcgttatagtacatgtaatatttcccgtcagacagctgggcgacgtccggcgcccacagcgtatcagactgggcccagtcgaatgtctcttttaattcggtgtagacgttcgggatcaggggattattgggattgacgcttgaagacatctgctgccactgcatcaggtttttcgacttggcggaagccaaatgcgagccgaatacataatatgtatcgcctgttttgatgacggacggatcatgcacgctgacctctgaaaaaaccggatgctgggcttttgcctgcggcagagtgaacccgatgaccgctgctgagaccaggcacacacgaaagaaactggttttcattttctgaaatctcctcgctctcttcttttcttaaaacgctttcaagacaacgctccattttatgatgcggatggcggaaatatgtgatcaacagcgccggcttcgcgatgtaccgctttacttcgataacaatctgatttgtgaaagactggaaaaaaagttttgacttctgattcgcaaacacttaatataaaaaacagttactagttatcagaatatttaagaattgagtgaagcatatatgaccttacacaaagaccgccgcatcgggcgactgtccgtccttcttctgcttcatgagactgaagaaaaccagcagatcagccggctggaacgggacggctggaaagtctgtctcggcagggtgggttcaatggatgcgcataaggtggtagccgcaattgaaaccgcttccaaaaagagcggtgtcattcaatctgagggttatcgcgaatcacatgcgctgtatcatgccacaatggaagctttgcacggagtgacgcggggcgaaatgctgcttggctcgctgcttcgtaccgtgggcctgaagtttgccgtcttgcggggaaatccgtatgaaagcgaggcggaaggcgattggatcgccgtttcactttacggcacgatcggggctccgattaaggggcttgagcacgaaacattcggagtcggaattaatcacatatgaatcagcccatagatttcagatgatagggggctatgcgtgaaatatcattttcatggcatagctcctttttgtatgggcgctttaccaaagtaaaggaaaaggggttgaaatgatggtgacgttagacggttcctcactgacaaccgcagatgcccagcgtgtgctgtttgattttgaagaggttcaagcatctgccgaaagcatggaacgtgtgaaaaaaagcagggcggcggttgaacggatcgttcaagaagagaagaccatttacgggattacgacgggattcggcaagttcagcgatgtgctgattcaaaaagaagacgccgcggatctgcagctgaatctgattctttctcacgcgtgcggcgtcggtgatccgtttccggaatctgtatcgcgggccatgctgcttttgcgcgccaatgccctgctgaaaggcttttccggcgtgcggactgagctgattgatcaactgctcgcgtatctcaatcatcgcattcacccggtcatcccgcagcaagggtcactgggggcgagcggggatttagcgccgctttctcatctcgcactggcgcttatcggtcaaggcgaagtcttttacgaaggggcccggatgccgacagctcatgctttagaacagacaaaccttcagccggccgtcctgacctctaaggaagggctcgcgctgatcaacggaacgcaggccatgaccgcgatggggctgatcgcttacctcgaagccgaaaagctggcctatcagtcggaacggatcgcgagcttaacgatcgaaggccttcagggtattatcgatgcgtttgacgaggacattcatgccgcccgcggttatcaggaacagatggatgtcgcagagcgaatccgctattacttgtcagacagcaagctgacgaccgtccaaggggagctgcgtgtccaggacgcctattcgatccgctgtattcctcaagtccacggcgcatcatggcagacattagcgtatgtaaaagaaaaattagaaattgagatgaatgccgcgacagataacccgctcattttcgaagacggcgccaaaatcatctcaggcggaaactttcacggacagccgatcgcctttgccatggattttctcaaagtggcggcggccgagcttgcgaatatttctgaacgccggatcgaacggcttgtgaatccgcagctgaatgacctgccgccctttctgagccctcagcccggcttacaatccggagcgatgatcatgcaatatgcggcggcctccctcgtgtcagaaaataaaaccctggcccatcccgccagtgtcgattccattccttcatcggcaaaccaggaggatcacgtcagcatgggaaccatcgcctcaaggcacgcctaccagatcattgcgaatacgagacgggtgcttgccgttgaagctatttgcgcgctgcaggccgtggagtaccggggtgcggaacattgcgcctcgtacacaaaacagctctatcacgaaatgagaaacatcgtgccgtccatacaagaagaccgcgtgttttcttatgacatcgagcatctgagtgactggctgaagaaggagtcttttctgccgaatgagcatcaccaaaaactgatgaccaatgaagggggacttacaagatgactgatgtaaagaaatcaatccgcgccggccgcggcaccgaacttgaatgcttaggatgggagcaggaagccgtgctccgcatgctccgaaacaaccttgacccggaggttgccgaaaagccggaggatctgatcgtatacggcggcataggcaaggccgcacgaaactgggatgcttttcacgcgattgagcgttccctcaaaatgttaaaagatgatgaaacactgctgatccaatccggaaaaccggtcggattgttccgcacgcacagccgcgcgccccgcgtcctgctggctaattcggttctcgtgccgaaatgggcggattgggagcatttccatgaccttgagaaaaaagggctgatgatgtacgggcagatgacggccggaagctggatttatatcggctcacaaggtattttgcaaggcacctatgaaacctttgcggagcttgcgagacagcatttcggcggcagtctgaaaggaacccttacgctgacggccggacttggcggaatgggaggcgcccagccgctgtccgtcacgatgaatgatggcgtcgtcatcgccgttgaagcagatgaaacacggattgataaacgcattgaaacaaactattgcgaccgtaaaaccgcatcaattgacgaagcgctgcgctgggccgaagcagccagacaagccggagagcctttatcgatcggccttctcggtaatgcggctgagatgcatcatgagcttttgaaccgcggcgtccatattgacatcgtgaccgatcagacttcagctcacgacccgctgatcggctatattccggcaggatactcacttgaagaggccgaccgcctgcgccgggatcagcctgaattatacgtaaggctttccaagcagagtatgaaaaagcatgtggaagccatgctcgccttcaagaaaaaaggtgccgtcgtctttgattacggcaacaatatccgccaggctgccaaagatgagggtctcgccgatgcttttgattttccgggattcgttcccgcctacatccggcctttattttgtgaaggaaaagggccgttccgctgggccgcgctgtcgggtgaccctgaagatatataccgcacggacgctttattaaaagagctgtttcccgaaaatcaagcccttcaccgctggattgacatggcacagaaaaaagtcacattccaaggcctgccgtcccgtatttgctggctcggctacggtgaacgggaaaagatggggctcgccatcaatgaattggtcagaaacggcgagctgaaagccccgatcgtcatcggaagagaccatttagactgcggatctgtcgcctctccgaatcgggaaacagaagcgatgaaagacggaagcgacgcggtcggcgattgggcggtgctgaacgcgctgatcaacacggcctcaggcgcaagctgggtttcttttcaccacggcgggggcgtcggcatggggtattcccttcacgcgggaatggtcgcggtcgctgacggcagcatccttgcggaacaacggctttcccgcgttctgacaagcgatccgggaatgggcatcatccgccatgcggacgcaggttatgaaaaagcggctcaagtcgccgaggaacaagacattatgataccgatgaaaaaggagcggtaacatgccgaaacaaatagataccatactcaccaacatcggccagctgctgacgatggaatccggcggcccccgaacaggcggaagcatgcaggatcttcatgtcacggaagatgccgtcatcggcatttccgacgggcgcattgtttttgccggacatcaaggagcggaggaaggatacgaggcaagagacatcatcgactgcgggagacggctcgtcacccccggcctcgtcgatccccatacccatcttgtattcggagggtcccgggaaaaagaactgaatttaaaaattcagggcatgtcctatttggatattctggcgcaaggcggcggtattttgtcaacggtcaaagacacgaaagccgcttccgaagaagaactgattgaaaaagggctttttcacctcggacgcatgctgtcatacggcatcacgacggcagaagtaaaaagcggctacggactcgacaaagacacggagctgaaacagctgaccgcggcgaaaaaactgggcgaacaccagccggtcgaccttgtcacaacttttatgggggcacacgccattccgcctgagtaccggaacagccctgacgaatttctgaatcgcatgctgcagcttttgcctgaaataaaagaaaaaggcctcgcgcaatttgccgatattttcacagaaacaggcgtctttaccgtcagccagtcgcgggactacctgaaaaaggcgtctgaagccggtttcggcctgaaaatccatgctgatgagattgacccgctcggcggcgcggaattggcggcagaactgcatgctgtttctgccgatcatttggtgggggcgtctgacgaaggcatcgaaaaactagcggcgtccggaacaatcgccgtcctgctgccgggcacgactttctatctcggcaaacacacttatgcaagagcccgggagatgattgatgcgggcgtacgggtcagtttggcgactgacttcaacccgggcagctcaccgacggaaaatctccagctcattatgtcgattgccgcgctccatttaaaaatgaccgcagaagaaatctggcacgctgtcaccgttaatgccgcgtatgcgatcggaaaaggcgaagaggccggacaaattaaagccggacgggcggctgacattgtcatttgggaagcgccgaattacatgtatatcccgtatcattacggcgtcaatcatgtccgccgtgtcatcaagaacggaaagacggtcgtttcaagggagggagccgctcttggataagtatccgtttctgcaaaaagccggctccctcttcaacgaccgccatgtgacaaggatcggcgatgtgacggaagcgtgggcgggacaaacgatcaaagggccggctttgatcggcgttccgctttctaagtcgtcaatcagccattccggcgcctgctttgcacccggtgcgatccgccgggcgctcggcgggatttccgcttattccgcggagctgcgggagcatgtcattaaccatctgtacgatatcggcgatattcagattcacgtcacggatgtcgtcacatctcacgaacacatttatcggaccattcatgacattctgacggaccagcctgactgggtgcccgtcattctcggcggcgacaactccatcagttattccaccattaaagccattgcggaaacgaaaggaacaacagccgtctttcaattcgacgcccaccacgacgtccgcaacacagaagacggaggaccgacaaacggcacgccattccgccggctgttagatgaaaatatcataagcggacaaaacctgattcagcttggaatcagggagttcagcaacagcttggcatatgaacaatatgtaaaagagcggcaggcagacgtgcatacaatggagatgatccgggagaaagggctcctccgaacgatacaagaggtcttgccggccgttcaaaaaagagccgacgccatttttatttcggttgatatggatgtgctggatcaagctcatgcgcccggctgccccgcgatcggcccaggaggcctgtataccgaagaactgcttcaggcggtccggtttttagccagtgaggctgacatctcgggtattgagatcgttgaggttgatccgacacttgattttcgcgatatgacaagccgggcagccgcacacgtcattttacatgcattaaagggatttaaattgtcacgttaaagtcaaatccggcacgcgtactctcggctgccggaagattctcacgccacgcaaaaagggggagatcacgatggatgttgatcaaggcggcaatcaactcaagcgcacgatgaaaagcaggcacttatttatgatttcattgggaggggtcatcggcacggggctgtttttgagcacagggtatacattgagccaggccgggccgggcgggacgatcgccgcttacctgatcgggggcttgatgatgtatcttgtcatgcagtgtctcggagaattgtcagtagccatgcctgtgaccggttcatttcaaacgtatgcgacaacgtttatcgggccgtccacgggttttatggtcggtatcatgtattgggtgaattgggtggtgacggtaggatcggagtttacagcttccggtatcctcatgcagcgctggtttcctcacagcagcgtctggatgtggagcgcgattttcgcggctctcctttttgccgccaatgcattctccgttaaattgtttgcagaaacagagttttggttttccagcgtcaaaatcgtcaccatccttttatttatcatcttaggcggcgccgcgatgttcggtttgatttcattgcacggttcgggtgaagctccgatgctgtcgaatttcacctcacacggcggactgtttccgaacggctttcttgcggttttcattgcaatgatttccgtaagctttgccttttcagggacggagctgatcggaattacagcgggtgaaaccgccaatccggcaaaagatattccgcgttcgatccgaaatgtcgcctggagaacggtcatcttttttatcggcgccatttttgtgctgtccggactgatctcctggaaggaagccggtgtgattgaaagtccgtttgtcgcggtcttttcccaaatcggtatcccatacgccgcagatatcatgaacttcgtgattttaacggctttgctttcggtcgccaactccggactgtatgcttccacccggatgctgtggtctcttgcgaatgaaaacatgatcagcgcccggttcaaaaaagtcacgccgaaaggcattccgctgaatgctctgctcgccagcatggccgtttcctgcatatccttgatctcaagcatcgccgccccgggcacggtctacgtggtgctcgtggcaatagccggatttgccggcgtcgtggtgtggatgagcatcgccctgtctcagctgttatttcgaaaacattatgtgaaaaacggcggacgcgtctcggatctgaccttccgcacaccgttataccctctcgttccgatcgccgctgtgatcttatgtttcgcttcatgcgtaggccttgcatttgatcccaatcaaagaatcgccctcttctgcggaattccttgtatgatcctgtgctatctcattcgttttttgagaaagaaacagccgaaacaatccgtccgtgacattcatttggataaaaccatgccataaaaaaaggcacatactgatgaggtatgtgcctttcttctcttattccgtaatcagcgtatgaaccagtttcggcgcttccgctttttctgagatgcggatgttgtcatagactttggcggtcacgtcgtcaacgttttcgcggttggcgtaaagggtgacgagcggctcgcctttttcgacgttgtcaccgacttttttgcggagcataatgccgacggcaagatcgatttcgtcctcttttgtcgcacgtcccgcgcccaacagcatcgctgcgacgccgatttcgtcagcgacgatttctgaaacgacacccgcttcttttgccggaacgtcaattttgtacgccgcctgcggaagtttggacggatcgtcaacgacagaagcgtctcctccctgattgcttaggaactctttgaacttttcaagcgctttgccgtttttcatgacttcctgcagcttcgttctcgcttcttccaatgtctcagcttttttcgccaatacgaccatttggctgccgagcgtgagaacgagttcgtttaagtcttcagggccttcccctcttaatgtatcaatggcttcttgtacttccagggcattcccgatcgcaaaaccgagcggctgcgacatgtcagaaatcacggccatcgtctggcggccgacgttgtttccgatgcggaccattgctttggcgaggttcacggcgtcttcatccgttttcataaacgcgcccgcgcccgttttgacgtcaagcacgatggcatctgctccggcggcaatttttttactcataattgagcttgcgatcagcgggatggagttcaccgtacccgttacatcacgcagcgcatacagctttttatcggcaggcgtcaaattgccgctttgtccgatgacggctaccttgtcgcggttcacaagcttgatgaattcatcttttgataattccacgtggaagccttcgatcgcttccagcttatcaatggttccccccgtatggccgagaccgcggccggacattttagcaacgggaacgccgagcgccgcgacgagcggtgcgagtacgagagttgtcgtgtcgccgaccccgcccgtagagtgcttgtcgaccttaatgccttcaatggcggagagatcaatcgtttctcctgaattcaccatcgccattgtcagatcggcgcgctcctgatccgtcatatcctgaaagtaaatcgccatagccagcgcgcttgcctgataatcagggatgcttccgtccgtgtatccttttacgaaaaattgaatttcttctgttgtcagttcttttccattttgtttttttacaataagatctaccattctcatgatctatcacctgtccttcatttatgttcagtgaatcaatccgacgatcgccgctgtcaggaagctgacgagcgttgcgccgtacagcagcttcaacccgaaccgcgcgacgacgtttccttgtttttcatgcagccctttcaccgcaccggtaatgattccgatagaggagaaattcgcgaatgagacaaggaatacagataccactgcctgtgtatgcgcactgaaatggaaatcaccggacgagagcgtctgcatcgccacaaattcattcgataccattttcgtcgccataatgcttccggcgctcaccgcttcattccacggaataccggttaaaaacgcaaacggcgcgaatacatatccgagcagcgcctggaatgtaatgccgaagaccgcattaaaaacgccgttgaccagagcaatgagtgcgacaaatccgatcagcatcgccgctacgacgacggcgactctgaatccatccattatatactcaccgagcacttcaaaaaaggattgcttttcttcttcaggaacgacgatcaaatcctcttctttgctgacggtgtacgggttgatgatagaagcgatgataaatccgccgaataagttcagcacaagcgccgtcacgacgtattcaggcttcagcatcatcatgtaagaaccgacgatcgacattgagaccgtcgacattgcggatgcgcaaagcgtatataagcgctgttcagtaagataaccgagctgttttttcaaactgataaagacttctgattgccctaaaatcgcggatgcgacagcgttgtaagattcgattttccccattccgttcaccttgcttaacgcaagaccgatatacttcgtgatgaaggggaggaccttccaatgctgcagaattccgattaaagcggatataaagacgatcggcagaagcacgctcatgaagaacgtcgtctgtttcgcattcacaagcccgccgaatacaaagttaatcccttctgatgcatattccagcaagtagttaaatccttttgcaaaaccgccgacaagaaaattcccgataccggtgttgaggagaatataaccgagaatcagctgcagcacgagcatgacggcgatcggccggattctgattctttttttgccgttgctggcaagccaggcaagacctaaaaacacaatgattccgataattccgatgagatacttcatatgtgttctccttttatttgtattcgcttacaattttttatgcatcaacaaagaaagaggatggcggaagctttcggcttccgcactgctgattaatagtcgctgctgccgctgtctccgccgctcacgatagagacgcccgcacttgcgccgatccggctcgcgcccgcagcgatcatgctgtcaacatcagcttttgttctgatgccgcctgatgctttgaccccgatgtccggtccgactgtttttctcataagagcgatatcttcagccgttgccccgcctgtagaaaaaccggtagacgttttgacgaaatctgcgcctgcggataccgccaagcggcacgcgcgctctttttcttcatctgttaaaaggcatgtttcgatgatcactttgacgagcgcttttttatcagctgcttcaactaccgcgcggatatcagcttcaaccgcttcatcatcgccgtcttttaatgcgccgatattgatgaccatgtcaacctcagttgccccttttgagatggcatccttcgtttcaaatgcttttgtttccgatgtcgttgcgccgagaggaaatccgataacggtgcaaacgtcaactccagtgcctttcagttcctccgctgcgagtttgacccaagtcgggtttacacaaacggaagcgaatttatattcttttgcttcttttatcagttgtaaaatatccgctttttgtgtatgcggtttcaaagcagtatggtctatttgacttgcaattgacattgtatgcacttcctttttcctaggatacgtttagaataaccgaattttgaacatatgtaaattggtaattgaaattatgttcatgaattgtcacaattcttgaatgagttttttggccgtatgctgatcggtaatcaaaacgttggcgtactttcctttcagggcaccgtgaatggccttgcattttctgctgccgcccgccaccagaatcgaacgctctttcattttcaagtcgctgagctcgactccgatcgtcctgccgttaatgctgctgctgcaaatcctgccttcctcgtcaaaaaagcgcgaacaaatatcgccgactccgcgtgctttcagcaattgtttctcttcttcccggaaatagccgagtctgaaaagcagcgcctcatcccggacggttccaaccgtaaacagggcgatattggcttgtctgcccatttcaatgatccgcttaatatgtctgtcccgctcgaccatctgtttcacatcggcgctgtcaaatataaccggcagcggcaaatacctcggcatcgtctgaaatgcttcggcgaacagctgaatcgtttctgacgagtacgtattaacattggaatgactgatgccgcctttcagctgcacgacttcaacgctctttacctgcttcggctccatgcggcttgcgatctggtacatcgtcgtcccccagcttacgccgagtatatcgccgtcctttacggttttatgcatatagtctgcgccatagcggcttaagtaatgtgtaatggcctggtaatcgtcgcttggagaaaagacgacgtgcgcctcaagcagcccgtatttttcttccagcttcgcgccgagttcgtccagatcctcaaacgggtccatgacgcgaatttgaacataccctttttcctttgcgtactgaagcagccttgaaacggtggggcgtgacagatcaagccgttcggcgatctgctgctggctgtaatctgattgataatatagttttgccgcttctatgctgagctgctgtttttcacgatccatgtcgcgcctcccctctccgcttatcatatcaccaaaacacgcggtaaaaaagcaccctctgatggggtgcctattttttcagcacaagctcctgaatcgcatgcgccacgccgtgttcgttatttgatttcgtttcaaaatcagctatctcccttacttccgggatggcattggccattgccacaccgcagccggcccactgaatcatggacatgtcgttgccgttatcgccgattgccatgacgtctttctgttcaatgccgagtttttcggccagcagcttgactgcgtttcctttactgactttcgggtgaagaatctcatggaagaatggcgcgcttttgaccattgtgtatgtttccttgaatgattccggaatggaagcgatcgctttctccagcttgtccggatcgtcaatgaacatgactttcggaatcagaatatccttcggcacttcatcgatcgtgcggaaatgaagcggcactttcgtaatgtatgattcgtataccgtgtattcactgatatcccggttcggcgtgtacagattggctgtgtcaaagtaatgcatcggagtatccagctgtaagctcagctcgtaaagcgacttcaaatcctcataacctaatgactgctcggccacgacaccgtttgtatacgtattttgtacgagtgcgccgttataggcaatcacaaagtcgccttcttcctgtaagttcagctcttccaaataccgacgcacgccgccgatcggccggcccgtgcacaggacgatattgaccccttccgctttggcggcatcaagcgccccgcggacttcagccgtcacttcatgatgatcgtttaatagtgttccgtccatatctattgcgattaacttgtacatcctgcatctcctttgtatccttttctacttatgctttcatcatatcgttttttcgtttcaatgaaaaatcaaacggacaagtttctccgccttctcttcgtaaaccgggcctgcctccggatgcggggccgtcttttccccttgtcagcttgttcgccgccgtcatctgttttctgcttcaagagcatcagccccgccgcaaagaaagggatggccgctatgtccagaagggcaagctttattcccatcgctgcgggaaagtatgcccataatgaacggctgttccgcctgatcatgatataagaaacgatttccagcaggataaacagagcgttcacccacatgtaaatgagcagcgccgcaaacagaaacagcaggagcgtattccgcagcgtgccggaaaacagaagagcgcgcatcatatcaaagaatgaaaaagactgcatgcttccgtttacgacattgggattgtaaatggtaaaacgcccgaactgatcaaaaagcataaaaaataaccataacagtgaaaaccattgaatgatatgtacgatgacacccgtcaaaacgagtctgtcggcagccttatttctcatgtgcatcctccccgccggtttttattcttgtcattgtctttgtttctccgtatatcttccaaatgagcgtatcgttttttcctcttttcaacgtgcttttgacggggtgcggatgtccgaggtattcaatctcgatcgtcccgtccgtgttttgtgagatcaccttgtacacatctgagggcatggcaacctcgccgcggccttgaatgacctgctttgtcagcacgctgtctttcgtaaacgtgacggtttcagatctgaccccgtccatcgggcccggtttcagccccgcatcccatgtcccgtaataaaaagggggttcgtctgctttcttttgcgagcagcctgttatcatgacgcatccgaaaacaagaaccgtcatgatgaaaatccgtatgttccgcaacatgatcaccttcctttgaagcttttttacgcctgtaacttaggcggatgccgtggcactgtgcaattgactacatagtgtataaagacttcactagataaggagaatgatgaatgaacccatatcagtactacaccccgcctgcctatttccctcagcagcaggaatacgaagtgaaccgcgttgagtatgagccgtatcagcagcaggaaagctattattatgcgccccctcagtccgaagagcggcagccgacaggtttagaacggagagtcgcccagcttgaaagacaaaacgccgagcaaacgagagagctcacccgcctctcacaagaagaccagcgccaaaaccgggaaatcacgcgtatgaatgagcagatcagacggctgagccagtccattgaaatccatacccgccgcttaaaccgtttgaatcagcgcctgcgcgcagtcgaaaacagactcaatattccttttcacgctacagaaggcggcttctgagaaaaagggccggaatacaaagctcgacaggccatcccgagccttgtattccgctctgtacataacaggtaaatatttgaatccttttcttgcatgaatgcctctcctattctttcacatgataaatgtgtaaaatcaatcactccaggaggtcttcatgatgtatcaaaaccaatacagcggaaatcagctgcagcaatgccgccaaacagcacagcagcttattcagcagacacagcaaagcagtcagcagtacaagcaaatgctccagcaggaacagcaaaacattcaaatgcttcagcagatgcttaaccatgaacagcatgccgttcataccattcagcaagcgctgcaggggcatgaagcggccattcaaaaatgccagcaaatcgtgaatgtgtgcaatcagcttcagcaggaagtaagcggacacatgcctgcaccgatggcaaacgctaatgtttcttcattcccgcaaacacagcatcacacaccgtttcagcagcattcataccagcaataggccggtcatgcaaatgacaaagcgcgagataccggctttgtcatttgtttttatctctgttttgtcagatcaatgcgatgagcgggttgtccgccgaattttgcttccgcctcatgccttaccgcttcatacgctcttgcttcgacgttttgtttaaacacatcaagctgtatcaaataagccgcccgcactttcagcccgtgaatgatggagatgacccataaaggcagcacgatatacacgcccggcgtgctcggcagcacaaaagcaattgctaaaataataaaataataagtccgtatttcagccattttttgttcttagcccggtagccgatatagaaaaaggccaagaaagcggtcagcgcaaacggcgcaaaagtcagcagcagccaccagctgtgcagcacttcccaccaagtccctcttttcgtaatcaacattcattcctcttcctttactactataacatggataatcaaggaaggttttctataaaaaacatagacggaatgacgtcttcctgctatattaataatgataatcattatcactgaaatagggggatcattatgaagaaacaatcatggctgatcggcctggcacttctgcttgttttcgcattaagcgcttgcagcggcgcgaaggaaaacaacggatcggcatcaggcaaaggaaagacagacatgcgtacatatgaatcaacaaaaggaaatattgacatacccgcacatccgaaacggatcgtcactgacttttatgcaggtgagctgctgtccgttgacgcaaatgtcgtcggggcgggctcatgggctttcaaaaatccgtttatcaaaaaacagctgaaaaacaccacggacatcggcaatcccgtcaatgtggagaaagtgatgcagctgaagcctgatttaatcgtgctgatgaaggatgaccaatacgagaaactatcgaaaatcgcaccgacgattgtcattccttttaacaccgcaaagaatacgaaagatacggtcagcctattcggcgacattgccggggcgaaggataaagccaaaagctttatggcagacttcaacaaaaaagccgaagcgaatcaaaagcgcctcaaaaacgtgatcggcaaagacgagacagtcggcctttatgaaacgacggataaaggcgaaatctggattttcaatgacaattccggccgcggcggccaagccgtttataacgcgctcggattgaaagcgccggccaaaattgaaaaagacatcatgaaaacgggcgccatgaaacaggtttcccaagaggtcatccctcaatatgcggctgattatatgttcattaccgattacaatccgaatggagaaagcaaaacatttgagcgtctgaaagattcatccgtttggaaaaatctcgatgccgtaaaaaacaatcgtgtctttatcaacgatttcaacaccttctatccttatgacccgattgccgtcagcaaacagatggatatcatcaccgacatgctgatcaaacgggctgaagaaaataaaaaataaaaaaagcggcacagtcatgacactgtgccgtttttcctgttcactttaattttgactgtacggagcccggcatatcttcaaacctgacttcttcccaggtctcgacatactttcctttcgccttcaccttcaaatacgcgttcttccgaaggtctttcgcggcgtaaaaggtcacttcttcttttttcccggatgcgttgtatccgtctaatgtatactcagtaccgcccgggctaagatgtttgccatctcgattaatctgtacatagacatcttgctggtgaataaacggattaaatctgtctgtaacatcgttatgaaaaaagagaagtccgtatatgacggcagcggccgccaagacggccaggattgccaatgcttttttcatctgcgcactccccttacttgttcatttttttcaaatagcttgaccgcactgtgaggaagaacagaagctgaaaaatgaaaaaccctccgatagtgaaactgagcggccccgctacatcggaatagccttccacggccaatgttctcaaggcaaacagcgtatgcatgacggcaatgacgaaaggaaagaaaaagagaatcgccaattgtatcgtcacgctttgtgccatttcacgctcactcaggccgattttagccagtgaacggtagcgctcccggtcctcatctaaatcagtgaacagcctgaaatataagaaacttgctgccgcgacaaagaatacaattgcgataaacaggccgataaataaactcaggctcggcagctgcaccgtatcatagtacgtcccggcttttgccataaaatcagaatgcacgtcgatatagttgccgtaaatctcatttttcaaggattggctgatcccaagactgtctttccaatgatcatagctgtagccgtataatgacgctttttcaccgagtgatttaagctgatcaaaggtttgatcgttcaccgcaatgacggcatttaatgaaatcagcggtttttcgacttcttttaccgtcagtttttggtcagacggcttgcctttttggttcagcagcttcagctgatccggcgcttcgtttttgaaattgcggtcatacgtgcccgggaaatagacagcctcatcatgtttcaggccgttcagcttgacatggaagtatgttgacacatccgatttgctgatcatgtaaacagggggaacagtttctccttcctgatagcggacataggaaacatttattttgtctttcttatacgtaaagccgtgtgttttcagttcatggtcaatttttttcaaatgagtctgttcttttgggttgccgctgtaagataaatactccatctcataagcggactcttccgccccgacagtcgatttgtacatcgcgagcacgcccgtcgccgtaaacgctaccgcggaaataatgctgacgataaagaacaggcgggcgttgtcttttaatcgatagacaaggtcagaaacccaaatgacatttttcccgcgcagataaaaggttttccacttcttcagcgcgcgcagaatccagatgctgctttggctgaaaaagaaatacgtgccgatgacggtaagcagtaaaatgataaacggttgagtcccatggacattgccttttaaaaccatgccgtacccgccgcacaggcaggcgatgccgaatatagacagaagcacggacggcttcggctccggcttgatcttgtcagtgccctttattaatttgatcaccgtatttgatctgacaaaaaggatcgtgaactgcgataaaaggaaaaataagagcagaaatccgccggccgtaatgccgagcgctttccaaggcatgtacagaggcagcgcgtccatttctaaaatataagcgccgaccgtaaagaacgttttcgaaaaaatgaagcctccgataatccccgctgcgatcgacatgacgccgatgatcatgttttccgccgtaatgagctttctcagctgcaccggcgtaataccctgcatcagcaggatgccgaattctttatttctcgatttcaaaaatgcgttaaccgaatacagaacaaataagaaagaaaaaacaaagatcatccattccgcggcggttaagccttttctggcgatgttattcaggtagccttcctttagtgccggatgaaacaggaacatcgcaaaggtaaagaaaatcaaaacggaaaaagcgctgcttaaaaagaaagcaagataggcccttttgtttctcgtgacgtttttataagcgaactgaagaaaggtcatttgcgtttccccccagcatagacagcacatcaagaatctgctcataaaagacttggcggttttccccgcggtaaatctcattaaacagttcgccgtcttttataaagatgacgcggcggcagtagcttgccgcaaccggatcatgggtcaccatcaaagccgtgacatgatcatcctggttcaggctctgcatcgtttccatgacgtcttttgacgctttggaatcaaggtttcccgtcggttcatcggccagaatgagtgacggcttatgaatgaccgctcttgcgatggcggcccgctggcgctgtccgccggatacttcaaacgtccgtttgttgagcaggtcttcgattccgagctttgccgcgatgccgtgcagtttttcttccatgacagacggcgcttctttttcaagcgttaacggcagcatgatattttcaccgatcgtcagcgtgtccagaaggttgaaatcctgaaacacaaacccgagctgcttgcggcggaaatgagcgagctttgtccgcttcagccggtgcgggttttctccgtgaatcaggatatcgcctgaatccggccggtcgatcgttgaaatgatattcaaaagcgttgtttttccggagccggacggtcccatcaccgccgtgaacccgccttcttctattgaaaacgaaatttgttttaaagcttgataggacacttgtcctttataggttttatttatatgtttgacttcaagcatattcgccatgaaaatcctccttatggttttattcttgttggtctgggctgctttcatgtagtgccggggcatttaacataaaaatccccttgacataaatccatgttatcaaggggaaacaaaacgagctatgttgttttcttaacgcagccttacatttttgtaagaaatgaaaatcggaccgatgtcccttcaccgggggacgagctgatgtccaccgtatgattgagcttgcccgtaatttctttgacgagatgaaggccgattcccgtagattcttggaaacgccgtccgttttcgccggtgtaataagggtcaaacacccgcttgatatcttgcgagggtatgccgacaccgtaatctttgacttcaagcaccgtcctgtcttcatcgcggaagacattcagctccagtctgtcactcttgcctgccgaatacttgaccgcatttgtgaccacttggccgatcgcaaatttgagccatttggcatcggtgtaaatctgatgatcatcgcgaatatccattttcggatagacccggtattgaataaaaaatcgtttatagctttgaatgactgattggagaagctctgataaagaaaccgcttcaactttaaaatcccgctcaaacaggtcaagccttgaagaataaagaagcgtctcaagcccgaattcaatctgccggacctcttttttgatttgttcaaagacgggctcatcctcttcctgaatgattaaattaatgaccgacagcggcgtttttacttggtgcacccattggttcatatacgtcacccgcgcgtcaagcttggcttcggtctcatggagcttctggtgctgcatccggatcagctccatctgcttttcatacagctctgaacaaaacactgaagaaccgagatacgggatgtccgtcccttcctgctccgagctgagccaatgatacacaccgcggtctttgtaccagcgataggcaagatatcccgccaaaataagaagctgcacgcccaatatgtaaaacaggtgggaaaaagaatgaagacccgcaaaccagtaataaaagaaaacaaacagcccttgaaggagaaaaagcagaatcagcacggcatgagaccggagaaacagcttcatgacagccccctcagctggtagccttcgccccgcaccgattcaatggaaacaggcgcattcagctcccgcagtttttttctgagccgcgtgatatacacgttaagtgtattatcatcgacgaaaatgtcggtgtcccacgtcttttccatgagccggtctcttcccgtcaccttttctccccgctcgagcagcacttccaaaagcttgctttcttttttagaaagctcgcttttttcgtcctgaaagcgcagttcaaaccgttccacaaagagctgcacaccggcatattcaaccactttctctccctgcttggcggcgtactctccgtatgccctgcggatctggcttttgattttcgccagcacaatatcataagaaaacggtttttcgatataatcatctccgccgttttcaatcgccattacctgatccatttccccgcttctggctgagatgaaaatgatcgggcttgtagaatgctggcggatctggcggcaccaataatagccgtcataagacggcagattgatatcaagcagcaccacatcaggcttttcccgcaaaaaaacatcaagaacagccgtgaaatccgcagcggccacggtttgatatccgtatttttcaaggtaattctgcaatagtccgcgaatgtcttcactgtcttccacaatcatgattttattcatgcaaccatcctccaaaaggatacggcttttcggagccctcattatttgatgcccccatcataatgctttcatcggttctctgcaacatgagaaagcgggcctttataaaagacccgcttctccctttctcaatgtaagatcgattatttctaattgacattgttatacttagatggcggactcggaaaggtaattttaaatcttgtgccaattcccggctgactatatatatcaatatttcccccatgtgccttgataatttgttgagcaatagccattcctaatccagtccctgagttatttgacgaagcgcttgtccctctgaaataccgatcaaataaacattcaaccgtctcttcgtccattcctattccatcgtcttctattataatttgtatttcattgtcatgtaacacgtcatgatataatatgacctttattttagtgcccggaggattatgtttaatacaattagcaatcaagttttcaactgcgcgctttaggtacctttcatccatattaaaaagtatcttattgtgactggattctatagcgaatctcttattttctgactccggtagcaacttcattttttctaaagtgtcatgaattactttcactacgtttttttcttcaagatggattggaagcgactcatttttcaattgaaaagttaagttgaaatcttcaatcagcttttccatatattcgacacgttcttccattattaaggaaaaatcacgcacttgctgattttcccactcatattcatttgaagataaaagaaccgtatatcccttaataaccgaaagaggggtttttaaatcatgtgagacaccggccatccactcttctcttgttttttccaacaactctctctcagccttattcctttgaagcgttgaggtaagttcagacagagcttgcattaattcttgataggtcttatatccagatttattatgtctatatttgcttgaatgaaacttccaatcataaggttcttcatatttttctttagacaaattctcaatccaagatacaataaacagcaggggagcacctagtttttttccgtaaaatattgcaattacaatcccttccataataatagaaactatccacaagttattcacccaatagaaaaaagggttatttttttccatcggttttccccatacccatgttaaatcctgattgtttttcgtttcataccacgtagataattgataaccttttttggcaggatacatgtaatctgatattaactctccaagaatataatgcttaggtatatttttaggtttattaaaagaaaaaacctcatctccttgttcatctaaaatttgaatccacattcggttctctaataaatcttcttttgctttcgtatttattgaaaattgtttatctgcaacaactgtttggtcaacaattttttttaaggataagtgcggcgtttccattttattctgacctaagacgaggatgaaaaatatgatactgcccacaatgagcagaccccaaataaacatgagtaaaaaaagtctcgatacgaagtaaaatgctatcctatttctcagcttcaaaataaatcctcatctataggctctgcttcaaatatatagccctgtcctcgaaccgttttaatccatcttggtctgctcgggtcttcctctaatttttcacgtaatcgtcttacatgtaccattacagtactatctccgccataaaactccccccacacatctttataaatttggtgtttacttaaaatttgattgggatgttcacagaaataaatcagaagtttcatttcctgagcagggcaatcgattcttgtcccgttaacaacaagtctgccggtattgggatctattttaaaatattcataatcgtatacctgttttagagggtaagaagaagagagttgagtcattctctttaattgggcttttacacgagctacaatttctagtggattaaatggtttagtaatatagtcatcccccccaaaactaaacccttgcaatttatctaaatctgttgtttttgccgttaagaagagtatcggcacatttgtatgggagcgtattttgctgcataaggtgaagccatcagtgtccggaagcatgacatctaataaaataatatttggaagttcctgatcgattttcagaagggtttcgctccctgtcatagctgtggaaatattgctgaaaccttccttttcaaagcaagttattaataagtttaagatatgttcgtcatcatccaccatgaggattttgttctcttctaacgtcataagttaccctcctttttatttcttattttatatgagatcaatgacataaaggtcagaaaaggaaagaatttaactttcgttaagggttcagaatattcttttaaattttcgaccttgatattcaggtatcaatataactacatacagaaaataaaccagggatgtcgttaagtgaatgtttaggaagagtttcgtttgtgtttaaagaacatcgcttatgataaaagtgaggtgagagacaaatgaatgatcaaatagtggtaacacacaatctaactaaaaagtataaaaagcatacttcagttgatggattaaacttaaggattaggcgcggcgaaatttatggttttcttggaccgaatggtgctggtaaaacaacaaccatccgaatgttattaggtttaattaaaccaacaaaaggaagcatcgaaatctttggccaaaacctaaacaagaatcgtttgcagatattgcaaagaatcgggtcactggtagaatctccaacttattatggtaatttaacagcttacgaaaacttagaagctgttaggaggttacgaggacttccggaacaacgagtcaatgaagtattggaaactgtaaggttatctaaagtagcaaatcgactgactaaggagtattcccttggaatgaaacaacgtttgggaattgcagttgccctgttaagcagtcctgatttattaattctggatgaaccgacaaacggtttagatccatccggtatccaagaaataagagagctaattaaagaattgcctaaatcgggaatgagtgttattgtatccagccacttattgagtgaaatagatcaaatggctactcaagtggggattattaacaatggaaggatgattttccaggactcgattgcaagtttacatcaaaaacgaaaaccactattaaaagtcggtgttagtgacgtaatcgaagcaaaaacaatactaaacaggaaaggattaaaggttgatttacaaaaaaatgatttgtggctgtctcaaacagaaccggaatttgtttcagaaatcaattccatacttcttcattcagggctgtctgtatttcgacttgaagaaaagacacgatcgcttgaggatatttttttagaattaactggtacagagggaagtctatgaaaaagttattatgggcagatcaattaaaactgaaacgttcgtcgttattgattgtagtcttattggttcccttactcattatagcatatgagttggtaaatcttacttatcgatctgaatacgtggaaaaacaagctgaaatgttccatgctggatcaatgtggatgtatttactgtatgataacagtttgttatttggtctgggttttccattagccgcaacactttctgcgtcaataatagcaaatatagaacatcaagcaaacggatggaagcaaaccctttcttttcccgtatctagaatgcgaatttatgtaagtaaatttatttgcttagtagtcagtttatttatttcgtcaacaatcttcttgctcggcatggtactgctaggcaaactggtaggattcgaaggtagtgtaccttggggacttttgtttggagatagttacagcatgttagttacagtactgcctataatggcattccagatatggttatctatggtgtttagcaaccaagcattctcaattcttgtaggatcaatatcatctataatgggtttgtttttggcagctgctcaatcaacgagatggtttccgctggcttatcctagtcaatcttcgacagtcattctgcagtatgaaggtataggatataacccagatctttcatcttacctttgcattagccttttcttagggataattatattatttctaggctctattcattttgctaaacgggatgctttgtaaaaaggaggcgaaatacttgaaaaacattttatttgtagaacgtttaaagcttaagcgatcaaagttatggatcatctatttattagggcctttgttaggtgtatccctggcatacacgaactttattaaaaactataacctttttatgaatcctggagacaatccctgggtagaggcttggacacaagttgccttatttatgggcccttttgtattgcctatcgtagtgggaattttcgccgcccttgtttgcaggggggaacatgtaggaggcggttggaaacagcttctagccttaccagtcaaacactcagatatctttctgggaaagtttctaacagtggtccgcatgatattcattagtatgttcattttaatcctcttatttattggattcggttatatgttaggcataagcgggagtcttcctttacttacaattctaggttatggaattagagggatcttagcttgtttaccattaattttattgcagcttattgtttcaattaggtctaaaacatttggcataccactcgctgttagcattgtttttacattaccggccattattattgccagtacaccattaggtcaagtatatccatggacacagcctatgttagcaatgtcacccgaagatgaatcaccgattcaatcaaacttcctattttactcaattatggtaataacatgtctcggtctcctggtttacggaataagaaattttactaaacgagaccttacgtagggtatatgcggtacttatgagaattcgagacaaggtaataatgaaatcactgcgaaagacaaagatacatgacttatggatttttttaacaaaagaaagaaagttaccgacgtcatcgataaagaaaaggataataacgaattctagttttcataactatagtaaacgagggggcaagctgtaacaaatcgcttggattgaaagagcctgtaaagatgaacaggttgatttgattgtgatactttggtgaaacgcgagaaggacataaacggaaagacgaaagcactcacgatgttgtgagtgcttttcatcagccgacctgctgttttacagctttaccggctgatccgaactctctcattttgcttcgtactgtctcttccacggcttcaatgccgggtgtcatgtagccgcgcggttcgtacagatcaccgtttttctgaaacatgcggcgtgtttcttctgtccaggcgaccatacattccgtgttgatattgattttcgcgtggccgagcgtgatggcttttttgatctgttcctgcggaatcccggatgctccgtgaagaacgagaggaatatcagtcatgcgggagatagcctccatttctttaaatccgagattcggttcaccttgatatttgccgtggacggagccgagggcggcggccagcgcgtcgatattggtttctttgacgatccgctcacattcggcgacatcggcatagcggaccccgccgaccagcccgtcttccatgccgccgaccgtgccgacttctgcttctactgagacgccgtgcttagcggcataatcggcgacttcttttgtcatcgcgatgttctcatcaatcggatgatgggagccgtcaatcatcactgagctgaatccggcgtcaatggcctgtctgcagcgttccgcactgctcccgtgatcaagatggagcacgacgggaacggtaatcgccatttcttccattaacgcgccgaccatggcggaaatcgttttaaatccgcctaaatagtcgaccagacgatcggaagccgcggcgatgaccggcgattgctccttttgcgccgcttgcagaatcgccttcgtccattggaggccgttgatattaaattggccgactgcataatgctcccgtttcgcttctgcaagaagatgtttcatggtgacaaaagccatgttcacgcctccttcatgaagtattttgatacgacggcttccgttgtttcctttgccgttttgatcgtttcctccgcagtcagcttataatattcaggtctgaacagctctacggagacaacatcattgaatccgatttcttttaacgctgacagatgggcgtctaagtcaatcgcaccctgtccaggccagacgcggtcttcatctgttaaaaagccgatcggaaagtcttctgtatcgtcgatatgatagatgaaaattttctttccgtccgcctgcttcaagctctcaatattggagcccatcgcgtggaaatggaagctgtcaaacaccagtccgacattatcgcggccgacagcgttcacgatgtcatacgcctgttcaaatgtattgaccgtgcattgcgggtggccgacaaattcaagggcaatgtttacgccgtacggctccgcgatgtccgaaagctcagtcagcacctctatgctgctctttttgatctcttctttcaaaattttccgctctgtcacaagcggcacggccaccacatatttcacgccgagcgtcctgcaggtttccatcatgcttttgaattccgaaatgatctccctatagcccttctcatcacggttgttgaagaaaaccagtgcgttcagggcaagcggtttaatgtgatgggttcgaaaatattccgccagatcggccagtgaatggtcttttaagtattccggcagcttatccattgtgcggatttcaatataatcatagccgtgcttttcgcacagttctaaatcctgtttcaggtttgaattctccagcgtagtcgcttcattaaagcaaagtttcatgtcagcctctcccatccaacgttttcgatatgaagggagtccggcaggagggcttgtttgccccgctccgccgaactccgtactcagcttatgccatgcctaattcttcctttaatttcttaagcgtggtccggcttgattcatccgctctttcgccgacccaagcaaaaacggcgttcgtcgcaattccgtcgaatttcatctctctcatctttctgaaaatcgtctcaaaatcaacctcgccttgcccgatgtccaaatgctggtgaaccgttactttcgcgtcaggcgggttgacgatgtagcgcaggccatgcgccgctttatgattaaaagtatctgcaaataaaacatgtgtgaggcggtcgccggcttcatcaaacatggtcgcaatatcgccttttccgtcatcatagaagaacgtatgcgcagtcgagtagacaagattgatccaatccttgtcaagcgcgcggatcatatccatcgcacctttgtgcgtttcgataaaatcgtatgggtgagcctgcagattgagtttaacgccttctttttcaaagatgggcagcagttcatccatggatttgataaatttttcttcacttgtcaacggatcatattttgaaccgctgaattcactgttcatcaaatccacttcaagttcaaccgcaatttcgatcgcccgtttccagttgcgcacggcggcctgacggcggtcttcatcaggacccgcccagtggtaaagcggaagaagagaagacagcttcacacctgtatcttttaaaaggcgcttcaattgtttgatttttgctgaatcgactttcggatatttatagaaaggacaaaaatcctcgcgcggagacagttcgatatattcgtatccgagttccgccgttttatagaccatttcttctaacgttaaatcatcgcggtacatggatggatctaaggccagtttcatttctttcactcccgatctattatttgttcacagtcgtaaatgattggtagaatgccggtttctcttgcagcgccacaggctctttctgtccggattcctgagcttttacgcacgcgtcagttgtcaccgcggcaatataaccgtcccatgccgtcggaccgctgacttcacctttattccggatcgaatcaatgaagtcttgaatttccacatcatacgcagccacaaatcggcgcttccagtccatcaggatatcggtgctgaatttcccttcttttctcaagctgatgcttgacggttccggaagcttgataacgccgtcttccccgacgatttcacattgaatgtcgtagccgtatttacagttcacgtagatttcggcattgatgacgatgccgccttttgtttcgatgatgaccatctgcggatctttcagatgcggcagcgcattttttgatttcttcggatagatcacctgtacggattcatagtcgtcattgacgagccagtggaggacatcaatttcatgaacgagcgtatcgacgacggccatgtccgttgaataattcgatgcgactgtcgggttgcggtgcgcacagtgaatcatcagcggctcgccgaccacgcggttgtcaatcgcttctttcagctgaacgtaaccgctgtcatacctgcgcatgaaacctacctgcaccaatcgttttcccgtcttcatttcttcctcgacaatgcgcatacagccttctgccgttgtcgcaagcggcttttcacaaaacacgtgcttgccgtgctgaatcgctttcaaaacgctggactcgtgagccgggccccagcttgtcactaagacggcatccacgttttcagcagcgaggaggctgtcgtcatcaggataaacggaggcgttcaaattgaaatcctgaacggtctgctgcgcggcctcctgattcacatctgtgacagcggtaatttccgctccggacagcttatttgtgatgcggttgatgtgctcttttccgatagcaccggttccgataacacctatacgtaaattcattgatcgccactccttctgataatcaaataatggttctcgtctttcttttctcgctgccgtcctgaggagcgccgtacagttcctcctgtatttgttcaagcgacttgccggacgtattcggtgcgaaaacaagcccgatgatcatactggccgtcacacatatgagcagaataccggccataaaaccgatgccgaattgtgacatgatgaccggcacaaataaactccaaattccgattgaaatacggacgagaaagaacatgagcccttgtgctgacgctctgtgttctgtcgggaacagctcgcttgcccacagctggtagttcgcctgctggccggctccgttattgatgccgatcgctaaaacaaacaaaagcagcatcgggagcccctgaaacggcagtaaaaacagcgaccagccgacaacggccatacatgcgcagattccgaacaccgttttccgatatttatctgcaaaaggcatgaagatacaggcgacgccgagcccggtgaagataaacagggccatctgcagaatgttggccgtatttgcggatacgccgccgacctgctggtagatgtacggcatgaagaatcccatgacgcccgcggcgagattccatacgagaaacacacccattaaaaacaaaatgttcttgaaaaatttcggctgaagcaggtcaaaataagatgtttttttcacggcggcaggccgctcttcactgtttttccaggcatccgactcaggtaaacgctttcttatcacatatgtgatcagggcgatcaccaatagatgcgcaaagacaattttatttcctaaaagcccgaggtcaccgaccaaaacggataacagcagaaccacaacggctcctgcggcccacgccacctgcgccactccgcaatgcctcgcccggtttttctcaggggcgttttccgcgataatggtccatgaagccgtaatatccgcgcctacagaaatcccgataatcatgtatccgcataacagcatgggaaagttgaatccaaacaaaaccaaacaaattcctaaggcgtagacgagcatactgtttgtgtatacagcttttcggccgaccttatcagccaaatacccgccgagcagcgctccgatggccgctgatatcgcgtttgcgctgaaggcgccgagcaatccgatctggctgtcggacagcttcaagtagctgacccacatagataaacccgctgatcctgccacgatggaacctgcatcaatgtaatttgctaatgctgcggcgatggtccttttgctgaaagctgattccgccttggcactattcatataagtccccctctaatttgcaggatcaagcagttcactgtcgatgtactttcttgcaatcagcgcgtactcaagcggattggcgactgccgggtcttgttcggcttcgatgacgatccagcctgaataatcatgacggacgagcgttcggtatacttcggtaaaatcgatgcatccgtcgccgggaaccgtaaaaatgccctgtaaaaacgactgcctgaatgacttgccttcctgtctgcaccgctccataatgtcaaaccgggcgtccttgaaatgaacgtgtctgatccgatccatatgcttgttgagaatcgtcatatagtctccgtccgagatataggcatggccggtatcataaagtaaatggacataccgcgggtccgttccatccatcagccggtcaacttcttccgccgtctggacgcctgtgccgagatgatgatgaaacgtgaggtccagcccgtattcgccagcgattttcccgagacggttcaagccttggcacagcgtatcccattcttcatctgagaagtgcggtttttccttaaatacatcaatgtccaagccctgaacgctgtacgtctgttcagaaacgatggcgacatccgctccgactttctgcaaataatcacagtgttctgtaaattgttcagccgttttttcaataccgtcttgtacgataaagctgctgaaccatttccccgcaatccgcaagttccggagagccagctctttattgaggacggagggttcagggaaaaaccctcccacttccgtaccttgaaagccggcgacaacaatatcgcttaacaaatgctgcagcgtattcccggctccgatttccggcatatcgtcattgcgccacccaatgggagcgatgccccacagaatatcttgtttgcccatcgtgatgcctcccctctagtactgcttcgcagacttcagcttcatctctttcgcttcgtatgcccgctgaacgctttcctgctccgacacttccgccacgccgacatgccaccagctgtcatagccgtccgtcatcgttttcggcagaaccttcatttcaattaaagtggatacgtcttgcgttttcgcatcttcaagcgccgctttcagttcttcaaccgtattggctctgtatgttttagcgccgtagccctctgccaccttcgcgtaatcaacgtttaaaatctgattgtcctctgtgcggaactcgcaaaaataactgccgctcccgtgatccatctgcaggttgttaatacagccgaatcccgagttgtcaaaaagcaggacattgatttttttgttatattgaagcgcggtaatcagctctgagtgcagcatcagaaagcttccgtcgccgacgagtgaatagacttctttgtcgggatgggccagcttgaggccgagcgtgcctgatacttcataccccatgcaggaatagccgtactcgaggtggtacgtattcgggacattggaatgccacagccgctgcagatcccccggaagagatcccgccgaactgatgacgacgctatcttcaggaatcgtgtcattgatggtcaacagcgccgttgtctgcggcagctcagtcccgagcgcgtcggcatactcgtttaacacatcctgtgagaaatggttttttatttccggtttgaacgcgtcacgtgtaaaagtgaccttgccgagccggtcccgttcagccagccattcatctttccagtctttaatcgccgtgccgaatgcacttttatatccgtctaataagccgtgcagcctgccgagcgtcactttcgcatcggctacgacctgaaacgcgtcaagcttgtaagcctgcatgcggctgacgttgatattcaaaaattttgctttgtcaaaatcaaacgccgttttcgaggatgtcgcaaagtccgtgtaccgtgtgccgacaccgatgatcagatcagcctggcgggcggctttgtttgcggcgagggtgcccgtgatgcccatgccgcccagattgttggcgaaatcggcttcaaccgttgacttgccggcctgcgtttcgacaagcggaatgccgtatgtttcagaaagcgcgattaattcctcacgcgcgccggagtacttcgcgccgccgcccactaaaatgacgggacggctgctctgcttaattctttccgcggcgcctttcagttcacgctcgctcggctgcatccggtcaatgtaatgaacgcgtttttcaaagaagctttcatcaaaatcaaatgcttctccctctacatcctgagaaatgcagatggtcgccgggcccgcttttgccggatctgtcatcacttcaaacgcccggattaagctgctcatcagctgctcgggtcgggtaatgcggtcccaatagcgggacacgggctttaacgcatcgtttgtcgtgacggcggcactgtattcctgctccacctgctgaagcaccgggtcaggctgcctcgtcgcaaaggtatcggccggaagcagcagcaccgggatatgattggccagcgccgtacccgcggcagccgtcaagttagcggcacccggaccgaccgatgtcgataccgcgtaaatttttcttctcagcatctgcttgctgtatgccatcgcggcatgcgccatgccttgttcgtttttgccttgatagactttcaggtgcccggcgtcctgctcaagcgcctgcccgatccccaacacatttccgtggccgaaaatcgtgaagatgccctcaacgaacggctcttcttttccgtcaacatgaatgtactgccggttcaagaattgaatcagcgcttgtgctgtcgttaagcgaattgtcttacccacaaacgatcccaccttttatacgttctatttaccgttaagactgtgctgcgcttcaatcagttcgatgatttcaccggcagccggcattgcttctgaggagctgtgtttgctgacgacgatggaagcggaagcgctcccgtattttaaagccgtttcaatatcccggccgctgacaagtccgtagatgaaggcggacgcataggaatcacccgctccgaaggtcttcagcacctttgttttataggcatgcgcccggaaaacttctcccgatctgctgtatgcgtatgatccgtcaacgccgtgcttaatgacgacaaggtcagcggagtgcgcaaacaaatggcggacggtttcatcgttatttccgccgctgcggttttccattacgtcaaattcgtcacgcgtaccgatgacgatatcggattgttccgccaccagcgtgtagtacacggctgtttcttctgccgattgccatgtatacggacggtagtcgagctcaaacacgacttttacgtcatgtttttttgcgatatgcaccgcttttaagacggcttcgcgcgacgggcttttcgcaagcgccgtacctgatacgagcagcattttcgcgtttgcgatgtagccttcattgacttcggacggctcaagatacaaatccgccacgtcatcccggtacatcaggatgctgcactcttcgggactgagaatttccgtaaaagcgagcccggctttgcgcccttctctgtcaacggtcatttgtgacgtatcaacgccctttccctgcatataagaaacgatgaatctgccgtgctgatcgtccgggattttgccgataaaaccggcttttaatccgagcttggcgctgccgatcgcaatatttgccggggagccgccgacatatttagaaaacgtcatcgtttcttccatcggccggttgtattccgccgcgttcaaatcaatacacgcgcgtccgatcgcgacaatatcaaactctttttcttcattaaatgtatatttcatcgttatctgccactcctcacttgttagcgttccaggatccattcatgggccggatcattatgaaacttccattttcgtgtcggtcccgccattacattcaggtagtaagaggtatacccgtccggaacaccaaccgggtgatagcccgccggcacgatgacaacgttttcattttctgcggtcatcgtctcatcgatcgagcggtcgtccgtgtacacacgctggaagacaaacccctgcggcgggtacgtttcatggtaataggtttcttctaaaaaggattcagccggcagattgtcttggtcatgtttatgaggcggatagctcgaccagttgccgctgtccgtgtaaacttcaacaacgagaaggctgtttgccgatggatctgaatcggggagaatattatgaacggttcgtttgtttgccagcttgccgcgatgttccacaccgttgtcttccgctttaatcagctttgtcggaagctggtgttcggacggagaatagcacagcgcgaccctcgccccgctgaccgctgtgatttcaaaagagcggtcattggacacataaacgctgtccgtcggttttctttcaaatacgctttcacgggtgccgatgctttcaaatgtctgatcataatcagtgacggtgatttttcccgttaccgcaacgatgcagcactccgtctttttcaaatcttctgtatatgcggaaccgggagtgaggtcaacgactttaaatccgacgtatttgaggtctgaattggctgaagtgacgtcatgtatgatgttcacgccttgagaaatctcatcggcctgcggtttgcgcagcaaatgactcatgtttattcctccttaatggatggtaaaagaaaacccggacggaatcacaaagccgtcagggccggctgtcagatcaattgaagtcaggagacgggtatcgtgccgtcacgacttttttacgtgtatagaagtcgacgctgtcctttccgtttgcgtgcaatgtgccgaagaaagaagacttccagccagagaacgggaagaatgccatcggcgccggcacgccaaggttgatgccgagcattcccgcgtcaatattctcacggaagtagcggatcgcattcgcatttgaagtgaacagacacgcgccgttcgcaaattcagactggttggcgatgtccaccgcttcttttaagtttttcacgcggatgaccgacagaacgggcgcaaagatttcatctttccagatcgtcatatccgtcgtcacgttgtcaaaaatcgtcggtccgacgaaatagccgtcttccgttgcgttttcacgcccgtcacaaagaagtctcgctccttcttcgatgcctttttcaatatagctgtgcgtgcgttttttgttgtcctcgcggatgaccgggcctaagaacacgccgtcatccagtccgtttccgatcttgatgtccgctgctttttcctgtaatttcgccataaactcatcggcgattccctcttcaaccgtcacaaccgcgcatgccatgcagcgctctcctgccgaaccgaatgccgcaccgataatgtttgtcaccgtatcttcaaggtgggcgtcatttaacacgatcgtatggtttttcgcgcccgttaacgcttgcacgcgtttcaaatgttcgctgccttttttgaaaacatactcgccgacaggttttgaaccgacgaatgagatggctttaatctccggatgttcaagaacgccgtttacgacgtcatgcgcgccgtgcacgacattgaagacgcccttcggaaggccggcctgttcaaacagctctgccagtttttccgttaacagcggcgtgcgctcagacggcttcagaatgaacgtgtttcctaacgaaatcgccatcgggaacatccagcacgggaccatcatcgggaagttgaacggtgcgataccgccgaccaccccgatcggatagcggtaattcgccgcctctacatccgtcgcaatagaggcaagtgaatcgcccatcatgagtgacggcgcgcccgctgcgaattcgacgttttcaattccgcgtcccacttcaccgagtgcctccgtcgtgtttttaccgttttccaaagtaatcagacgggcaagctcttctttgttctgctggagaagctgctgatagttaaatagaattctcgcacggcgcggcactgccgtctttgaccatgtttgaaacgcctctgacgctgagcggacggcgtattccacatcctcccgcgtagaaatcggaacctggcacatcacttcttttgtagccggattgataacgtcttcatattgatctgtcttactttcaacccattcaccattgatgtagtttttcagttttctgatctctgccattctcattgcctccttaaatagtaaacatcctgttcagctggataataacggatgaatatattcatcttttacatataaaagacatgaattaaacgcttacaaatgctaaaatgatggtgactcccaatttttccatgtaaaagttggtcatgtaccggaaaaagcaaacggttacatctttcacttttgattttacaggttatgttttggtcatttcttggttacattgtaagcccaacacctcttcaagtcaatctaaaaaatcaaaattttttcattatttttatcatactttttttgatcgggaaaacaggaacttggagaaccgtgtcgaatcggaggggatgatccctcttttttatcatttgttaagtaactattgattaacttctggtgtttattatatattttaattactttaagaattctagaaggagtttttttatgaaactgatgcggattcaggagatggaagaatacattctcaaacacggagccacttcgctggatgagctgtgtgaggtattcaacgtctctaaaaacacggtcagacgcgatattaataagcttgcggaaaaaggggttatcaaaaaggtatacggcggcgtgacgtcagccgaaaaatctgtgctcgtcccttttgaaaaccgcaccattcaacatcaggatgaaaaaatcaaaatcgcccgctatgcgtcacggtttatcgaggatcacgatcttgtatttattgattccggcacgacgaccaaatcgatgctggagacgcttgatcccgataagaatgtaacggttttgacgaacagccttgatattattaacgccgcttcatccatgaaaaatatcgacctgatcatcatcggcaataactacaaacggaagacaaggtcgtttgtcggcattgatgatccgagcacactcaataaatacaacattaacaaggcgttcatgtccgctaccgggacaacgatcacccacggcctgacgaattccgacttactggaatacgaggtgaaaaagagaatttccgaaaaggcgaacgaagtgtatttgctcgcggatcattccaaattcggcaaatccacgcttttgacatacgcgcctttcgaccggcttcacagcattgtcacttctcagcagctcgatgaggaatatacgaagtattgccaagagcatcaaatcgacattcacttggcatagcgttatagttaatagagaacgctgccgtatttttccggcagtcgctatgatatccaattttttcagggggcgaaaacatgagcaaagtaacaatcggcaaaactgacctaaaggtatttccgatcggtttgggaacaaatgcggtcggcggacacaatctctatccgaatctgaatgaagaaacgggaaaagaattggttcgggaagcgattaaaagcggcgttaccatgttagataccgcctatatttacggtgtgggccgttctgaagaattaatcggcgaggtgctgaaagaatgtaaccgcgaggatgtcttcatcgccacaaaagccgctcacagaaaagaaggcgatgactttgttttcgacaattcaccggcctttttgaaacaatcggtcgaagacagcctgaaacgcctgcagactgattacatcgatttattctacatccatttcccggatgagcacacgccgaaggacgaagccgttcaagcgttgaatgagctgaaaaaagaaggaaaaatccgttccatcggcgtatccaatttctctttggaacagctgaaagaagccaataaagacggcttagtcgacgtgattcaaggagaatacaacctgctgaaccgtgaggcggaaaagactttcttcccttatacgacagaacacggcatctcattcattccgtacttcccgctcgtatccggactgctggccggcaaatacgacgagaacacaaccttccctgaaggcgacctgcgcaatgaccaggcgcatttccaaggggagcagtttaaagagaacatcaaaaaagtcaaccagctcaaaccgattgccgaaaagcacaatgccgatacggcgcatatcgtgcttgcctggtacttggcgagacctgaaatcgatatcctgattccgggcgccaaacgcgcggatcaattaaaagacaacatgaaagcagcctccattacgctatctgctgaagaaatcgcgtttatcgacaagctgttttcctaagaaaaaaacacgcctcttaaaggggcgtgttttttttatgtttatatttttctcttcggggaatgaaatagttatctaaataaactattatgcgttccaaaagatgaggaggatcatctgtgaagaaaaacaccaaaaaatacctgatttactttttcggagcattaggcgggctgctttacggctatgacaccggtgtgatttcaggggctttgttatttattaacaatgatattcctttaaacacgctgaccgagggattggtcgtcagcatgctgctgctcggtgcgattttcgggtccgcattaagcgggacatgctctgaccgatggggccggagaaaagtggttttcgtcctttcactcatttttattatcggcgcgcttgcctgtgcggcttcgcaaaccgtcaccatgctgattatctcccgtgtcattctcgggttagccgtcggcggctcaacggcgcttgttcccgtttatctatctgagatggcgccgacaaaaatacgcggaacgctcggcacattgaataacttaatgattgtaaccggaattttactcgcatatatcgtgaattacatattcaccccgtttgaagcatggcgctggatggtcggtctcgccgcagtaccggcggcgcttttattaatcggaatcgcgtttatgccggaatctccgagatggctcgtcaaacgcggccgtgagcaggaagccagacaagtcatggaaatgacccacgacaaagaggatatcgccgttgaattagcggaaatgaaacaaggagaagccgagaaaaaagaatctacgctcggcttgctgaaagccaaatggatccgccctatgctgctgatcgggatcggcctcgccatcttccagcaggcggtcggtattaacacggtgatttactatgcgccgaccatctttacaaaggcaggactcggcacttcggcgtccgttctcggcacgatgggcatcggtgtcttaaacgtcatcatgtgtatcaccgccatgatcttaatcgaccggatcggccggaaaaaactgctgatgtggggaagtgtcggcattaccttgagcctggcgtcactatcagccattctccttctggccggcctgtcagcttcaacagcatggctgaccgtgctgtttctcggcatctatatcgtcttctaccaggcgacatggggtcccgtcgtatgggttctgatgccggagctgttcccgtcaaacgcacgcggagccgcaaccggatttacgacattgatcctgtcggcaaccaacctgatcgtttcactggtattcccgcttatgctgagcgccatgggcatcggctgggtattcggaatattctcagtcatttgcctctcatccttcttcttcgccgcttacatcgttcctgaaacgaagggcagaagtttagaagaaatcgaaacgcacttgaaaaaacggttctccttaaagaagcgcagcaaacaaaatcaaattcttaaacagcgcacactgtaacaaaaaaaggaatcgcccccgctgggcgattcctttttggcgtcataccataactttgcaaatgtcattcgtaaattcgaccggatcatggatcggcagcccttcaatcagaagcgcctgattgtagagaagatttgtgtataatgccagcttttcccgatcttgtccgtgcgcgttctttaacgtctcaaacacttcgtgattcgggttgatttccagcactttttccgctttgacctgctggctgtcaggcatagcattcaacactttttccatttcgatcgtcacttcgccgtctgtcgcaaagcataccggatgggattttaaacgtttcgatgctctgacgttctttactttatccgcaagaatctctttcatgctttcgaacaggtctttatattcgttttcttcggcttcggtctgcttttcatcctcatcactgtcgatgcctaagtcggcgctagatacggacttgaattctttttcctcatagcttgtcagcattttgatcgcgaattcatcaatgtcttccgtgaaatataaaatttcgtagcctttgtccgccaccatttcagtttgcggcagcttttcaatccgctcatatgaatcgccggacgcgtaatagatatatttttgatcctcaggcattctggacacatattcgtccagagtgacgagctttttctccttagatgaatagaagagaagcagatcttttaatacgtctttattcgcgccgaaatcattatagacgccgaatttcagctgtctgccgaaagattcatagaaagattcgtatttttctcttttgttcttcagcaggctcttgagctcggctttgatttttttattgatgtttttcgcaatcagcttcagctggcggtcgtgctgcagcatctctctggaaatgttcagcgacagatcctcagaatccaccatgccttttacaaagctgaaatggtccggaagcaggtcggcacatttgttcatgatcagcacgccgttggaatacagctccaatcctttttcgaattccttcgtataatagtcaaacggcatgttttccggaataaacaaaatcgaattgtagcgcaccgctccatcgacgctgatatgcacatgggtcagcggtttatcaaaaccgtaatgcttctcggcgtaaaaagcctcgtaatcttcatccgtcagctcgcttttattttttctccagatcggcaccatgctgttgaccgtctgttcttcctgaacttcttcaaattcgttctcgctgccctctttcggcttgttgaccgtctcttccattttgatcgggtagcggataaaatcagagtactttttcacgatcgctttgatgcggtagttttctaaaaactcatcatagctttcatcttccgtgttttcttttatttgcagggtgatttccgtaccgacggtttccttgtcacacggcgcgatcgtgtagccggcagccccttccgactcccatacatacgcctcgtcactgccgagcgccttacttttcaccgtgactttatcagccaccataaacgccgcataaaatccgacgccgaactggccgataatgtcatggccgtctttcgtgtcattttcttgcttgaaagcgagtgaaccgcttttcgcaatcgtgccgagatgctgttcaagctcgtcttttgtcatcccgataccggtgtctgtgacggtgagcgttctcgcttctttgtccgccgtcacttttatgtagtaattgtcttgatcaaacgttaatgaatcatcggttaacgccttgtaatagattttgtcaatcgcatcgctcgcgttggaaattaactcgcggagaaaaatttccttctgcgtgtaaatggagttaatcatcatgtccagcaatcgcttggattctgctttaaacttttttttccgcacttcagatctctcctttaattatgctttgatgttatgtaaaatcttttcagcatctatttatcatatacagtgacaattgtcaactaggattagcagatgcatatattgtaaatttaacatgttaatggattcatttcacccattttatcaataaaaaagagagaatgttgatcatcctctcctctctgcttctttccggcggccgaattccttcttcatccatatgtatgacgggtagaaaaacaaactaaataagataagagatcccaagtttcgcaaagactcatgcagaacatttcttacagtgagaggaaatatgatgtcctgaaatagaatagagataacggtgtaaatcacaaatcccataggaacaatggcataacaataaaacgctatctccttcttatgctgtatcttcaaaatatgtaaacctcccaatgatgtatatacataatattaacatatttaataggtatttagaaacagacctccgtatgtttatccccctattcagcgggaacagatataaaaaaaggaggaatcgcaatatgggaagattaacagacaaaaccgcaatcatcacaggggccgcgacaggcatcggacaagcgacggcacgggttttcgccgatgaaggcgcccgcgtgatctgcggtgacatcaatgaaagcgaactgaatgaaaccgtcagcgccatcagaaaaaacggcggagaagcagaagcctttcaccttgatgtatcagacgaagaaaacgtaaagtcttttgcggacggcattcagcaaaagtacggaacaattgatattctgtttaacaatgccggtgttgaccaagagggcggaaaagttcatgaatacccggtcgacctgtttgaccggatcatcgccgtcgatctgcgcggcacatttctttgcagcaaatacctgattccgctcatgctcgaaaaaggaggctccatcatcaacacctcctccatgtccggccgggccgcagaccttgaccgctcaggctataacgccgcaaaaggcggaatcacgaacctgacgagagcgatggccattgattacgccagaagcggaatccgcgtcaattccttatcgccggggacgattgaaacaccgctcattgataaattggcaggcacgacagaagacgaaatgggcgaagcgttccgtgaagccaacaaatggatcacgccgctcggccggctcggaaaaccggaagaaatggcagccgtcgcgctcttcctcgcttcagacgacagctcttacgtcacgggagaagacatcaccgcagacggcggcatcatggcatacacttggccgggaaaaatgctgattgataagaagtggaaggaagagacggagtgacggcgaaaaagaaacaagccagtgcaaaaacactggctgaacaagctgagggcgggttacttaaaccagcccttttcctttgatcgggtaatggcttcaattcgatttttcacttctaatttatccaggatcatcgaaacgtaattgcggactgtgccgcttttgatgctgagggcgtttgcgatttctttcgtgttttttccgtctgcgacaagctcgagcacctctttttcccgttcggtcagcgggttttcttcactatagatgtcctccattaattcaggtgcgtagacgcgtcttcctttcatgacgctgcggatggcgctgacgagctcatcgctcgggctgtccttgagcatgtacccgctgacgcctgcttttagcgcccgctgaaaatagccggagcgggcaaaggtcgtcaaaatgatgattttcacaccgctgtccttgagctcttctgccgcttcaagacctgatttcccgggcatttcgatatccatcagacagatgtcgggcgcatgtttttccacgaaatcgatggcatcctggccgcttgtgccttggccgacaaccgtcatatcctcttctaaattcaacagtgaaccgagtgcgccgagcagcatttgctgatcctcggcaatgaagatgttgatcatctgctaccatccttttcttttgattttgaatcattcgggattctcatggtcagctttgttccggcggctgtatcgatggctaaactgccgtttgcgaattcaagacgttccctcattccaagcaggccgtgcccctttgaaaaaaagcggtcttctttgcattgaaagctgccgtcatcttccaccgtaatgacaacctctttccaaagctgctgaatggtgatgcggcatactttggcgccgctatgtttcacgacattggtgacggcttcttttatgcacatgctgacgatgttttcgttcagcagagagatatgttttggcgcttctttttcttcatacacaaattcaattcctgccgcttcaagaatttgccgaacattgccgagctcatccttcaatcggatgcctttcatcgatgagacgatttttctgacctcatttaaggaggtgcgggccgtctgctgcacgcttttcagctcagtgcgggcctgttcagggtccttgtatatcagctttcgggcgaggtcgcttttcagcccgattaaggagagcttttgtccaagtgtatcgtgaaggtcccgggcgatacgctgcctttcttccagcttcacaagatcggcgattcgctcatttgcatattctaatttctcctcaaggcgctcccgtgcttttctgcttcgaatgctgagcgggagcaggatggcactgatcagtgtaatgacgataaacggaatttgtgtcaaaaaccacccttttttcagaacaaggctgaagttgacggcaaccgccgcactaatgatatgaatgtaatataagatgtaaaatggaactttgtctcggatatggccgatgaagtaggcgataaagaaggcgaaataaatataactgaacagcataactgagccggtcgaaatgccgatcagaagaagcgcccataagtaaagcggccagccttttgcaacaaatgcgaagcggtatgcgccaaagaaaacaagtgtgaaaatgatgccggccacgatgacaaaggtagaagagcttttaaaaataaaataaaaaggcaagatgaaaaaaatcatccatatataaggagaaatcccattcagtttttgaaatttaaaatacttcttcatctttgttccaccttctgctgcttgtgtctaccatcactttatcaaaacaccgccttcattgcatcctcacgcatgaagagaaggccctttctgataagagaaagagccgcgcgccatatcaggcatttttctttaaaggttctttcggtaccggatggggcgccggttttttccgcgcctcccgaaaggtgacaaattgcttttcgtcctcatcccacagacggaatttcatggattcaagacttgttttaagcgtaatggtcggtacgttttttaaaggctcgtgcccctcatgagcggcttccagcttgtagttcggcactttcggacttaagtggtggacatgatggtagccgatattgcctgtcagccattgcaaaagcttcggaagcttgtaaaaggagcttccttctaccgcggcctgcacatagtcccaatgctcatcggcttcaaaataagaatcctcaaacgtgtgctgaacataaaagagccagacgccgattgaccccgaaataaggaaaatcggaccttgaacaagcaaaaagttttcccagccgacaagcaggcacgtcgcagcagccaataagacaatcgccgcgttcgtgaaataggtgttccagcgctccttgcggcgggcgccttttacattgaaacggttttgaatcagaaatacgtaaatcggtccgagaataaacataataaacggattgcgataaagtctgtagcgtacttttgtccaagctgacgcttcgttgtattccttgacggtcatcatccaaatatcgccggtgccccgtttatctaagttgctgcttgtcgcatgatgaatggagtggctacgctgccattgaaggaacggaaacagtgtcagcacacctgaaataaacccgaacagccggttcagcttcttttgtttgaaaaaggattggtggcagcagtcgtggaaaataataaagattcttgtcaaaaatcccgctgctataacagtaaaggcgagggtcagaagataggagacattgaggctgaagtaagcaagaaaccaaagggcaaaaaacggcacaaacgtgttgaaaagctgattgacactatgctttgtatcggcaccggaaaatgcagcaacctgcttttttaaagatgcttgtttttgagttgcggcgtgattggtcatgaatgtcatatccccttttttttattatgattccaagtataccgaggcgctcgcggcggttgtagtagcagccatcatgccccgaatatgacatttgtcatgtttggcggcagaatgctgatcaggcggcatatggaaggtatcttttttacgagggataaagccggacacttcatatcggcacttaaaaacagcaaaaaagaacccggcctgttttcggctgagttctttttcatcatcctcacagcaaaatcacccgatacttctttacatccaaaaactgcagaaactcccgggccagcatgtccggcgcgtggtcttttccttcatgaagacgatattgaatcaagccggcgagcatggacgcgacataatatgcatagagttttttgcccgcctgaatgtgcaggggctgatgaagataaaacgattgcagcgctctgaacatttccggaatgacgtcaggcactccggagccctctctcagaaaatggacgagcggcaggccttccgacagtgccgaaaagagacggacgagcgcggcttccgcttcttccatggagcaatcggcaggctctccttttaccgtcaataatccgatcagatcccggcatgattgatggatgatcgttttcagcaatgcttctttgttggcataatggtcataaaaagtggcgcggcggaggttgctttgacgggcaatatcggaaatcgtaatcgccgcgtactcttttttttctgccattaagccgatcatggcttcttgcaaggcctgcctcgtccttgtcacccggcggtcggcgggctttttttcttcttgttccggcatccggcggccaaacagccagtaaaaccgtttttgagaaatcaaatcccacacctgtccgctgatcgcttccggggatgccccgggctcctcattcagccagtacaacacaatggcatacgtgtataaagcgcggtaatgaatgtacatatcctgttcagtcggtgagaaatccgcattgaccggtgacagcagcacatcatgccggaacacatcttttaaaaaagcatgaaagtgaaaatagggcattttattgcggtccatcatcgtttgaaaaaacacccgatgccgatcaacaaaagacagggtcggatgcactttttgccatccgccatgtaaatgaagcacatctttattcttcagcgaatcatacagcgcttcgctcagcccgtctttcatttcttcctctatatcctctaaaatcgcatatttatcttcgtaataaaggtacagtgtcccccggctcacatgcgcccgttcggcgatgtccttcatggtcacacggcggatatcccgctctccaagcatggccaaaagcgcttgtttgatgtcagttgtcacagaatccggcataagagacactccttccattagacagatcaccgcaatttgtacggtaacgtatagatgtgtttacgctgtctttgccgcaaaaacacatcacattataataggccctgaagaaacaaaaaagcaaccagaggaggaagaccgatggatcagcatataaaagcagacatcaaacgcgtctttgagcttcagaaaaaaaatcaaaaaacgctgcgtgcttcaacagccgggcagcgcagagaaaagcttcagcgctttttagatgccgtcaccgcacatgaagaagaaatcatcgaggcgatcagacgggacgtccgcaagccttatcatgaggtgaaaagagcggaaacgcagggaacgatcaaggcgattaaagataatatgaacaatctcgacacctggatggcgccgaaacgcgtcggctcatccgtcagccccgacgctgacggcgtattaatgtatgagccaaaaggcgtcaccttaattctcggcccatggaattatccgtttatgctgacgatggctccgcttgcggctgccattgcggccggcaacagcgcgattgtgaagctgtccgattttacgatggagacgagccatatcgccgcgacagttattcgcgaggcatttcacgaagaagaagtcgccatttttgaaggtgaggtcgatgtcgccacagaactgctcgaccagccgtttgaccacattttcttcaccggaagcacgaatgtcggtaaaatcgtcatgacggcagcggcgaagcacttgtcgtccgtcacgcttgagcttggcggaaaaagcccgacgatcatcgacagcggctatgatttgatggacgcggcgaaaaaaatcgccgtcggcaaatttgtcaatgcggggcaaacatgtatcgcacctgactatctccttatgaagaaagaagtgcagagcacctttacagatctcctgcaaaccattgtcaatgcaggttttatggaggatgatcatacggttgaccgcaacaaattcacgcagattgtcaacgaccgcaactttaaccgtgtcaaagtcctgtatgatgacgccattgaaaaaggggcgaaaacggcgttcggcggcgtattcgatgcgcatgaccgcacgatttctccgaccgtgctgacaaacgtgacgcctgatatgaagatcatgcaggaagaaatcttcgcaccgattctgccgattatgaattacgaagatatcagtgaagccgttgattacatcactgaacgggacaagccgcttgccttgtatgtattcagccataatcaggagctgatcgattatgttctgcagcatacgacatccggcaatgcttctgtcaatgatgtcgtcgttcatttcactgacgtcaaccttccgttcggcggtgtcaatacgagcgggatcggttcatatcacggtgtgtacggctttaaagaattttctcatgaaaaaggcgtatttattcaagcctctaaataaaaaaagaatccgcgcagatgacgcggattcttttttattatttttttgccccgaatgcgagcagtttcgtataagtgccgacatagagcgtgccgtcttcagccagaaccggggaggaaatgacattgctgtctgtttgatagcgccatttttcattaccgtcagcttcaaccgcatagacatttttatcgtcagaaccgaagtacacattgccgtccgcatcaatcagcggcgccgttctcacaggcccgtccgtatagaaagaccagttcatattgccggttttgctgatggaaaacagctcgccgcttccggaaccgatatacacattgccgttatggtcgatcgctaatgaagagctggagaaaccgtttaacgggaacgtccactttacagcacccgttgatgtataggcgtataaattgccgtcctggtttccggcgtaaacggtgccgtctctatcaataaccggatagcctttaaacccgttggacgtcgtttttgaccatttcacttggcctgttccggaattgatcgcgtaaaagatattattgtacgttgccgtatacagcgtgccgtttgacgctaacacgggagcggagccgaccacgccgtttgttttaaacttccacttttgcgtccatgtcgaaggcgacgtcggtttaatcgcatagatatagttatccagcgtcgacacatacagcgtgccgtcagagccgatagccgcatcggaactaggcgctccgctcagcggaaccgatgttaaaatgtttccggtttctttgtcgatgaaatatagttttttatcgtgagaaggaagataaatgacaccgtttgttccgagcaccggagtcagcgtataggtcgtcccgaggttttccgtcacccatttcacagtaccgtccggatgatacgccgtcagcttcccgtcttttgattgaataaatacggtgccgtccccatcaaccgcggcccccgcaccgttttgaggattggccggaacattcttttcccattttaacgcgccatcggcagtgcttgtaaaccggctttctctcgaccagttgaacatcgtcggagacatcgcctgcgcgtcataccgtcccgccaagaaaccggatgccgcatgattttgtttaaataccgtttccgcggcttgagcagccgccggatgcagccattttgcccccggcagatcagtaaccgctcccacagataaagccgcagcaaccgcagcgccggccgccaatgttttcattcgcaatgaagctgtcttttttttcaatgtcagttcctcccgtttctattaaaagctgctatatcacttcgataataccataattaacctatgaaatatttgtattttcggtagatttatagaacaaatgtcacatagcctgctgatgcttcggggatgatcgaaacgcggcaatataccacaccacattgacgatgaaagccgcgcctgaccaaacgaaaaggccgtaataaagagacagctcctgccctaaggaaattgcggtcaataacgccaccaacaagacagccgcgcaaatgataagcccgattccgcaaaaaacggccatgatgattttcatgacacgaataccgagaatatacaaaatgagcgggaccgcatatataacaaagatctggccgacggcggcccacatgcccgcggaattaaaacgattcgcgttcggccccgtttccgcaagcggagaaagcgagacgaggaccggcaataaacaaaacagcagagcggaaagcaaggtcaccgcaaccgcaccttttttcttttgattcatgtgaatatcctcctgacaataacccggcttttttaccggtaatctgataatatgttatattttagcacgatttttacttaatttgagaatgttttgccaaaaacgaatttacaaatccagaaaaatagatataataaacgttatggaaccgatattgattcataaagcgctatctaacaaaacacgaagtgatattatgacgtggcttaaacacccggaagaccattttgatgaaagaccttatcttgagcagggactcagtttccgcaccggaatttgcgtcggtgatattcaggcaaagtcggggcttgcgcagtccgtcatctccagctacctgctgaccatgcaaaaagccggcctgctggaatccgaacgaatcggaaagtggacctattacagaaggaatgaaaaacaaattaaagcctttgctgactatgttcagcaccagctataaccatgaaaggagggcttttttcgttctaacatatctacttttctgtatatgtagttataaaaggaggcatacataacaatgaaaaaaagcagttccatcttcattctgtttttggcactaggggttttcgggattatcacgaccgaaatgggcattatcggcgttcttccgcaagtggcggacagatttcatatttctgcttcaaaagcggggtggcttgtcagtattttcgcgttcatcgtcgctgtgtcgggaccgtttttgaccttgcttgcttcaggcataaaccggaaagtcattctgcttttggcggtgctgatgtttgccgtttcaaatgcggtctacgcgtatacggcgcatttcagtgtcatgctggcgtttcggatcattccggctttatgccacccggtgttcttttctgtagcgcttgcggccgctgcccggcttgtccccgccggccaatccggaaaagccgtaacgaaagtcttttcaggcatcaccgccggctttgcgttcggcgtgcctttcacgtcttatctggcggatcgtctctcccttgaagccgccttcttattcggcgctatcatcagtctcatcgcattcacgggcattcttctctttttgccatccatgccggtcacagaaaaaatgtctttcagaagccagctcggcatccttcgcaaaccggctttgtggctcaatatcgctgccgtcacctgtctctttgcggccatgttttctgtctacagctattttgcggagtacctcggacgggtgtcccatatgaacggcacatgggtcagctttatgctgatgagcttcggagtgattatgatagccgggaatttcgtcttcggcgctttgttatataaaaatatgaaaaagaccgtcatcctgtttccgcttctttatacagccgcctacttgctcatatacgggtttgggacgtctttcgcgccgatggccgtcctcgtcttcgtatggggcgccgttcattccggcggtctcattgtcagccagacatggcttactgcggaagcaaaggaggcgcccgaattcggcaacagcctgtttgtctctttttccaacctcggcatcaccatcggaacggcggcgggcggctggtttatttcacatttgggaatccatcagctgatgtggtgcggcatcatgtttgcccttctggctttcgggctgatcatgggacgcttggcatggggaaagaggctgctcgcaaaagcttaagctccgttgcaaaatccggaatgattacgtataatattccagattaaagcaagggagagaaaaagatacatggaaagaccggcaggattttggattcggtttctggcttacgtcattgatcaaatcatcataggaattccgatttttatcattcaatttatggtctcttttttatttgcggcaggcgttgcggcggctgaccccttcatgaccgaaaatcagtttaacatctcttttctggtgttcggcgtcatcccgattcttgcgagctcttttgtgatcagtatcttatatttcagcctgctcacggcctcaaagatgcaggggacactgggaaaagcattgctcggccttaaggtcgtcaatgaggatggcggacggatatccatcggccaggccttcggacgcgctttcgcatatatcatatctaagctcattctttatatcggattcatcatgggcgccttcggagagaaaaaaacgctgcacgacatcatgtgcagcacccgtgttgtctataaataatgacctcaagtccgggccttttgagcccgggcttttttatgacggctgtgcccgcctgatgtcaatgccgccctttccgtcagcctcaatgcggatcgtcccgttcacaataacagacagcggatggaactccgcatgctgatcagaaaaaatccagcggcggccgctcggccctaaaagcaaaaacgccccatcattgtaatcacccataaaatgaaacccattttccctaagaggcgcatgctttctcaccggaatgccgaaacgctgcagctccctcccggttgatacgacttcggcagccgtcagattcacctcgccgatattcagaacggactcaatcgaaaaatgttccgcgcttggcggcgatgtttctctcgcgatgaattccgccagattgttggacggatctttgaaataaaaggaacgcgcctgaatatgagagaaatacacctcatcctccccatcttccgtttgaaaaacgactttatccttcatccacgccttcgcctcatcaaaacgattattcggaatgttaaacgcgaaatgatacgtcggatgagagtgagaatcggcgcgcctgaattccaactcactttctcccgccttgatggtaaacgaatcaccggactcatcaattaaaggaaaacctaacatccgttcatagaagtgtttcgtctcctccaacgcacaactgtacaaagtaatgttatttatttgcatgatcataccccctttggttataaagacaatgaatatatcaatattcttgtctgactccgttcaaaaatgattcaatattctcaattcggtaagcagtataggggtgagtggaagctaataaagcgataaaaccttttcgaacgtcaatattttcacgttcaatccgatagaaaaattctaacagctcatctccgaaacccgctttcgcagctacttcatctgcccgatattcaaaatctctgcttccgatattcacaaaataaaatcccaaacggcagtacgttatgtaacaccatccgaccagcctaaagaatatatttaataaccccccagacacagaaggatttgatccgccgttcagaagcccttcaatacaccccagaataaaacatataaagaatcccatcacatacagcggcaacagtgcgatactcaaaatagtaaaactggaattaaacatcacaaggtgtaatgtgtctttaaaagcaagatgcgcatactcatgggccagtaccgcttttagctcaccatcacttaaatttctcatagccgccgaagtcaatcctatcgttttaaaccccagtgcaaatgcattaataccctcatcatctattaaaaaaagatccgcttttttcacatgaggataatgtctttgtacgcttacaaaaacttcatcgtttaacctttcaaggtactccttttctccaatggttgccgggcgccttaacccggcccttattctatttctccagtctccaaaaagtccataattcataaagaataacaatccgtaaatggataaaaaaagaagaaccgttggaaaaagcgccaaaggaaataattttctgaagatcataattgaaatcaaaactgtcagcccagaccaaacaatgtataaataattgaactttgtttttctaacttccatttttgatcacccttttttattatgtttgaatgatttaccactacttaaactgtctttttattatcagtttcgaaaatagcattgtaaagatgatcatccattttttttccgaaaaagaggtgctgtttttaacagcacctctttttaatcactcttcaaagtaatccaggtccactctcttgataacaaaagtattctctaaactaacgccgacattatagttgaacattaaatccgttagcctctctccatcaattaatataatttttttatcgatcactttaacatattcttttgcgccatcagtaaatacagatgtagtaataaacacaccctttttcgcttttttcccatccaggctgcccgcaaatttttgtatttccggccttgaaacagaatctttccacctcttggcttgaagataaatcatatccagccctaaaatgtcttctttgataactccatctatgccgccatctccagatctccctatagccgtgcctgcatctgttaatgaaccgccatatccaagagcaacaagcaattctacgactagtttttcaaaaaaggcaggagaacatttgtatatttggttcagtaactcttctttaatctcatttttaacagcattataattctgttcaatgatttcattgggagttctgggctctgaagtaatcgacggctcactttcctgttgattgctgtctttacccgtctgtttgaatctctgaaagctcttatacttcattagaaatctattatctatactggcgacactcgggtcattaattatttctaagccttcgctggtgatctgaaaaacaccccgtctgacaatgtcgattaaaccggctttacttaaatatgttcttacccaaccgattcgattatgaagtactttttggtttccgctgggtaataatttttctgcatcttcctctgacaggtttaactcttttgctaatttcacgtataagtcttgtaatctgtgctcctttttatctgaaagaatctttaaaaaagggtacataaattcttgatatcctggtatggtcaacttctacactcctatttaacgtctttgttaaaactggcttgatatttatattatttttgcgttcctaacacccctgcgtaaaaccatcttcatttcacacttaaatctctttcaaaaaatcactcatgatgatatatgaggtaaagctaatataagaacatccgctatccataattgaataagttcaaaacaaatatatatctttaaattccagtcaccggactcatcattttttttaaaaacctaacacccattcataaaagtgttcctgaacaaagttactttatttgcatgaccgtcccctctttggtttatactaccatatagagggtggattcttgatattattctgcaccaattgagaatccccctttcgcccggcgctaaacatgacaaacagcgccaaaccgcttataccaggcgtttttaaacatctaaagcaaaaaaagcagaaaataataccccatatagcttgacaaaaaataaatgttatttaataatctatatataattagaattattattgaaagataaagtgaatgctttgtctttttaatatatttcaaatcacatttcaggaggaagatattatgtctttaatcggaaaagaagtactgccattcgaagcaaaagctttcaaaaacggtgaattcatcgatgtaacaaacgaagatttgaaaggtcaatggagcgttttctgcttctacccagcggatttctctttcgtttgcccgactgaacttgaagatcttcaaggacaatacgctgcactgaaagaattaggtgttgaagtatactctgtttctacagatactcacttcgtacacaaaggctggcatgacagctctgaaaaaatcggcaaaatcacttacgcaatgatcggtgacccatctcaaacgatctcccgcaacttcgacgttcttgacgaagaaactggtcttgctgaccgcggaacattcatcatcgatcctgatggcgtgatccaaacagttgaaatcaatgcaggcggtatcggccgtgacgcaagcaacctagtaaacaaagtaaaagcagctcaatacgttcgtcaaaacccaggtgaagtctgcccggctaaatgggaagaaggcggcgaaacacttacacctagccttgatttggtaggtaaaatctaaggagtgcattccattggtacttgatgcaaatatcaaagcacaattaaatcaatacatgcagctaattgagaacgacattgttcttaaagtaagcgccggtgacgatgacacttctaaggacatgctggctctcgttgacgagctggcttccatgtcatctaaaatttcagttgaaaaaactgaattaaacagaacaccgagcttcagcgttaatcgtaccggagaagacacaggcgttacattcgccggtgttcctctcggccacgaatttacatcattagtgctggcattgcttcaagtcagcggcagagcacctaaggctgatcaaaaggtcattgaccagattaagaacatcagcggagaataccgctttgagtcttatatcagcctgacgtgccacaactgccctgatgtcgtccaagcattaaacatgatgagcgtgctcaacccgaatatcactcatacaatgattgacggcgcggcattcaaagaagaagtggaaagcaaaaacatcatggctgttccgactgtattcttaaacggtgaatctttcggaagcggccgtatgaccatcgaagagattctcgcaaaaatgggcagcggcgcagatgcgtctgagtttgccgacaaagagccgtttgacgttcttgttgtcggcggcggacctgccggcgcaagcgcggcgatctacacggcgcgtaaaggcatccgcaccggtgtcgtcgctgaacgcttcggcggccaggtactcgacaccatgagcatcgaaaacttcatcagcgtcaaagcgactgaaggaccgaagctcgctgcaagccttgaagagcacgtgaaagattatgatattgacgtcatgaaccttcagcgcgcgaaacgccttgagaagaaagatctgttcgaacttgaacttgaaaacggcgctgtactgaaaagtaaaacagtgatcctttcaacaggtgcccgctggcgcaatgtcaacgtacctggtgagcaagagttcaaaaacaaaggtgtcgcatactgcccgcactgtgacggaccattgtttgaaggcaaagacgtagccgttatcggcggcggaaactccggaatcgaagcggcgattgaccttgcaggtatcgtcaatcacgtgactgtgctggagttcgcgcctgaactgaaagcagacgaagtcctgcaaaaacgtctttacagcctgccaaacgtcactgtgcacaaaaatgcacaaacgaaagaaatcacaggcgaccaaaacgtaaacggcattacgttcgttgaccgcgaaacaggcgaagaaaaacacgttgaactccaaggtgtattcgtccaaatcggtctcgtgcctaatacagaatggttagacgaaacggtcgaacgcaaccgcatcggcgaaatcatcgttgataagagcggcgcgacaagcgttcccggcctatttgccgcaggggactgcacagacggcccgtacaaccaaatcattatctccatgggatcaggtgcaactgccgctttaggcgcatttgattatttgatccggaattaatgtgaaagccgccatatgaatggcggcttttttacatatactaattaagaaggcagtatttcctctaaacaatcctcgctgattttataagattttggccttctgcttaccagctcaacaaatccttgctgttctaaataatccattactctgttaattttatgtctcgatttatttgagagctccattaaatcttgcaccgacagcgtaacctgatcatttacaaatacattaatcgtgataatgatattaaaaatatcacgttcatctttataatcagcccattgatcgctatcaatatagttcctaattcgtttcagtttcattaaattaaattcaagatcctcaataattcctttttgtcctgacagaagcaactccagcatatccattaaataaaaagtcagctctccccggtttaaaggtgcgggaatttcctctaatgccttataatacttatctttattcttattaactgcgtaagaaaaagtgatggctgaatatttttctaagtatcgggacaaataactcccaacgataaggcgtcctgttcttccattgccgtcataaaaaggatgaatgtattcatagtagtaatgagctgtcatgtaacgatacagctggggatgtgtttcatcatgaagataagcaattaaagcctcaagcgcttctgttatcttctgttcagaattaacgccgatatgggtggtcatgttcccatcgttcacttcaacatagccttttctgaatagctcaccatccggcgcatcttctgttccgatttcatctgcgaccagctcgtcatataattccctaaagtcatgaatgcttgtaaacgacggaattcggtctataaattgatatgttttcatcaatccgacaaaccgcttatgtgagggctcggattgttctaacgctttaagagcctctttcaattctttttttgtactgcggattccttcaatttcattattactctgtgcttcattaataattaatttatcaaaataaggtttgacggcaaattcggggagctgactgataagggatgaaattttggaactgtttaacaacacttcattattcagcttcatgagtttatgtgtattcacataaaatagctcaaatgaatcgtccgtgggtcggccttttcggaacccccgtatgtttaatgatgttgaataactgccatagctgcttgttctctttttaaattctttctcatatgaatcagcatccattttataaaaaagcttagataacttctcatacttcatatcatcacctcgcttaatttaaaattatacacttttttaaattatacaatcattatagcctgatttctaacaaatattctcgctttccaatcaaaacaaaaaacggcatactgcatggcagtacaccgtctgaagcaattcaatctgtctttctccctctcgcccgatagataagaaataatccaataaaccacagcggcgtcagcagcaaagccgggcgcgttgcatccgcaaacagcataatcaccagaatgacggcaaacagcgccagcacggcgtaattgataaacggcgcaaacggcgccttgaaagacgagcttgcatgtaagtccggacgggttttcctgtatctgatatgacagacaagaatcacgccccacacccaaatgaaacaaatcgcgctgatggtggtcacgatgccaaaggccgcttccggtatcaatttgcttaaaagagcgccagctgacagcacaataaccgatatccataatgcgcggctcggcacatgatttttattcagcttcgcaaaacttgcaggcgcctgtttcgttttgcttaagttatacaaaatccggcttgttgaaaacatcccgctgttacaagcagaagcggcagacgttaatacgacaaaattaatgattcccgcggctaacggaatgccgaccagactgaaggtctttacaaaaggactttccgccgcattcagctgcatccacggattaatacataaaagaatgagcaatgccccgacgtagaaaaataaaatccgcaatggaattttattgatagcggacggaatattttttttcgggtttgacgtttccgccgccgacacacccactaattccacaccgacataggcgaagatcaccatctggaacgaaagcaaaaagcctgaaaatccgttcggaaacaagccgccgtgctcccacagattcgccgctgaaaccgttccggtatgcgttttgaacccaatcaccagcagaaccacaccgatgacaattaacgcgagaatcgtgactaccttaattaaggcgaaccaaaactccaattctccaaaaatcttaaccgttaacagattaagccctaataaaatgagcaaacagataagtgccggaatccactgcggaatatcaaaccaatatttcacatacacaccgacggcgatcacatccgccatagccgtcataatccagcaaaaccagtaggtccagccggtgacaaacgctgcacgcggccctaagtacgcctcggcaatatccgttaatgattggtagcctgctttagataacagcagttctcccagcgcccgcatgacgaaaaaaagcgcaatacctacaataaaatacgcaaagatgatagaaggacccgccagctgaatcgccttaccggaccctaaaaacaatccggtgccgatcgtgccgccaatggcgatcagctgcacgtgccgattcgataagtccctctttagctctcgctgctccacatctgactcctccttacctctctagtgaacgacgagcaaaaaaagccaataaaaaaagagattggatgccctccaatctcatggtcataagaatatcaaattatatctgcgccgctgacaatcaacagcatgacaaatacatattcggtactcttctgtccttttgcctgagattgtgaacccttcggcgccgcggaaaacccgcggtctctccagaagccgctcctgctgtagttcgacccacagcaatcatagcctgctacgtattgagtttctgatagaaatacctatcagctaactttttattttaatggaacttgaatgcattgtcaatagagggatgagctgcacggcgttatcccggtccaatttttgatgcctgaagcgccgtattttccgttttcattgtctcaaaaaggcgttatgcggtactatcatataaggtctaatcatttaaacattatgtcatactttaaattcactttatcatacaattgctcgtaaataaaaaggggatggacgagattggaaacgaaatatttagatctgctcgcacaaaaatacgattgtgaagaaaaagtggtcacggaaatcattaatctgaaagcgatactgaacctgccgaaaggaaccgagcatttcgtcagtgatctgcatggggagtatcaggcattccagcacgtgctgcggaacggttcaggaagggtaaaagagaagatccgcgatattttcagcggcgtcatttacgatagagaaattgatgaactggcggctttggtctattatccggaagacaaactgaagctgatcaaacatgactttgatacgaaagaggcattaaacgagtggtataaagaaacgattcaccggatgattaagctcgtttcttattgttcttccaagtacacccgctccaaattgcgcaaagcactgcccgcccaatttgcttatatttctgaagagctgctgtacaaaacagaacaagccgccaacaaagaacaatactattccgaaatcatagaacagatcattgcgctcggccaggccgataagctgatcaccggccttgcctacagcacgcagcgtttggtggtcgaccatctgcatgttgtcggcgatatttatgaccgcggaccgcagccggataagatcatggaagaactgatcaactatcattcagtggatattcaatgggggaatcatgatgttctctggataggcgcttattccggctcaaaagtatgcctggcaaacattatccgcatctgtgcccgctatgacaatctggatattattgaagacgtttacggcatcaatctgagaccgctattgaaccttgccgaaaaatattacgatgataacccgtctttccgcccgaaagcggacgaaaacagaccggaagatgagattaaacaaatcacaaaaattcatcaggcgatcgcgatgatccaattcaagcttgagagcccgattattaagagacggccgaactttaatatggaggaacggctgttactggaaaagattgattatgaccgcaatgaaatcacgctgaacggaaaaacatatcaactggaaaacacctgctttgcgacggtgaatcccaaacagcctgatgagctgttagaagaagaagcagaagtcatggacaagctgctgttctctgttcagaactccgaaaagctgggccgccatatgaattttatgatgaaaaaaggcagcctttatttaaaatataacggcaacctgctgattcacggctgtattcccgtcgatgaaaacggcagcatggaaacgatgatgatagaggataaagcttatgcgggccgagagctgctcgatgtatttgaacggttcttacgggaagcgtttgcccatccggaagaaaccgatgatctggcgacagatatgacttggtacttatggacaggcgaatactcctccctcttcggaaaacgcgccatgacaacctttgagcggtatttcattaaagagaaggaaacgcataaagaaaagaaaaacccgtattactatttgcgtgaagacgaagcagcctgccgaaacatcctgatggaattcggtctcaacccggatcacggccatatcatcaacggccatacaccggtaaaagaaatcgaaggcgaagatccgatcaaggcaaacggaaaaatgatcgtcatcgacggcggcttctccaaagcctaccaatccacaacaggcatcgccggctacacgctcttatacaattcttacggcatgcagctcgtcgcccataaacactttaactccaaggccgaagtgctgagcaccggaaccgacgtcttaacagtgaaacgattagtcgacaaagagctggagcggaagaaagtgaaagaaacaaacgtcggtgaagaactgatgaaagaagtggcgattttggagaagctgcgggagtatcggtatatgaagtgaagaatatggagttcagggatgattctctgggctctttttttacggtttccctgtatgtaaaacggatttaaccgcttcttcaatctccctataacccgtacatctgcaaatattggactccagccaattttttatcgtgtcatcacttgcattcggctcagtattcactaaagcatgacaattcatgagaaaacccggtgtgcaataaccgcattgaaacgcgaatttttcaataaaagccttttgaatcggcgtattgatcagtccttcaattgtcgtaatgtcctttccttccccttctgccgcaagcattaagcaagatttcatcggcaccccgtccgttaataccgtacaggcgccgcaatccccatttaagcagcccggttttgcaccagttaatccgagacgaagacgaagagcaaataacaaagtatcagccggcctgaccgtaatctgtctttcctcgccatttactttcaacgtaataggatcagacatttggacctccttctaattcccgtaaggcatctaaaattgtattttgcaagacaaacattcggtattcacttgagccttctgcatcatcaagaacgggtttgggtacatactgtaaagacctgcgcaccctatcttctaatgaataacttttatcgttaagcacagcctccatttcagcagaacgaaacggaaatggacatacgccgctgaaggccattctgatctcatcatcttttttcagcgcacagactgtcaccaatggatacccgacattccactgctgtcttcttttgatactgacaaatggcaggtcaacgtacgctcgatcgacaacgacatgaaataaaaaatcacctttttgcaactgtatttccttgttaaatactttatttatgggacggtaatgaatccccgctctccctgcaatccctatcaaactatcagaaatcaacaacggcagcacggcctcacggtaatagatgcccccgcaaatgtttccgcccaggctgatcttatttcgagtcgtccgatcggctatttcacttactgttttacttaatagcggaaatggattttcttcctccagtttcgttaatgacacgcccgctccgatcaccagatcattttcataaaagcggatggtttgaaattccggaagctcgttcatatctatcaccgcatccgtatagatgatattcagccttcctaacgtgataatttccgtgccgccggaataatacattggtgttttcttttcggccgcaagcgagtgaaatagattgattgtttcttgaatggtcttcggtttaaaatagtcgaaatcaaacggtatcatctttccacccctcttgcgtcctccataatcgttcgggaatgagaggaagttgattcaattggacacctaaagcggcggaaaggcaatttcccaatgctgccggcatccccaacagtccgtgttccccgcctccgcgcgctccataaggcgcaatcacatgcggggtttcaacaaattctatgatatattcaggctgctctccatagtgaagggggcggtatgttctaagctgaggatttaatactctgccatatgaatcaaatacaaaggtttctcttcctccaaatgcgattcccatactcatcccccccatcacttgacccctagcagctttttcattcagtacagttcctatatccacaacagaataggcttttgtaattcgatacgtataatcccgtttatccaactcaacttcaattccctgagcaccgacagcccactcgggtcccggctttcctcttcccgtttcccggtctaaattcgtcatccgggttaatgtgtaattgccgctcgcaatgatttggccgccaatggtatttccattcggaaacgtatatccgtaagcaatgtcttttatttcaacatgtacagaaggatgatctataaaataaacctttccgtcggccacttccaattcctcgacaggaacccgcaacacacatgatgccacgtccttaagctttcgaatggcttcctccgctgcattcagtacggcatttccggccattaacgtccctctgctccccacggttttccaatgctcgggtgttgtttgtgtatctataagcatttttacatgaattttgcttatatccattttcattcgttccgccaggatttgggctagcactgtttttgtccctgttccaatttccactacccctgacatcaaattaatgcttccatcgggattaaaggttaaaatcaccccggacgttgcatttgtatcaaatgttgaggttttccaaatgcagctgattcccttcgcccgtatcttccggccatcgatttcaattcgctgtccctcggaccaattcattaattccttcaatctctcaatgcatttcggcacatttccgaccgtgcttgaattgagaagaacttgagtcggtgtggtgtcaccggggcgaatggcatttttatagcggagttctaatgggtccatgttcagcttttccgccaatacatccatcgtccgctcaaaggcaaataacacttcagcatggctgtagcccctgaatgcacttggatatggatgattcgtatacatacaatatgaatcacaccgtatatgatcgatcgcgtacggacccgtacaatcaaccaccgcagcccggctgatgtccactcctttatcagaatacgctccgccatcaaataaaaactgaatgtccgccgcctttaagattccatcctttgtagcccctaatttgacaatggcatccaacccgatatgaacgggagatgtgatcagatcctcttctctcgtattaaacaatttgacgggccggcctccgactgcttttgatgccaaataggcaatcacctctaactgaacggctgcttttcccccgtacgctcctcctactaaaggcgttttgacgatcacctttccgggttcgattccaaaataccactgcattaattttttaatggcaaaaggagcttgagaggatgtggtaatgataatctcctcatccgcccgaatttcaacaatcgagcatcttgtttccatcgcagcgtgatcagaagggttaaaggaaatctggaattctgctgtcacatcactttccctaaacccgtcttcagtatttccttttctaaccttatccaagtttgcgatattggtcttcggaaccgggaatacaccttttgtcttctcatagcggtccgcatgttcatggacgagcggcgcatccttttgaaaggcctcacggggggaattgacgacgggaagaggtttataggatactttgatggcatccgcggcctttttagctgtaatcggattttccgcaacaacaaccgcaaccggctcaccatggtatctgacccttttataagcaatcggcgatctgtctttaatttcctcacctgcaagcggaaaaggttcatcacccaatatcgctctcacgccgggaatcttccaagcctctgaaaagtccatagacacaatatcggcatgcgcatatggactgaccagcatttttgcgtgtaatgtgcctgtttcttgaaaatcatccgtatatttcgctttacccgtcactttttcaagagcctcttttcgaatgacactcttcccgatatactccaactcattcactccccgaatttattcagcagcagcgtataatcttcaactgtatcgacgtcataaaaaagcaaagggtcttgaaagctgatcatttttcccatattgatcatactttcacggatgacgtgccgggcgccctgatctccctttaactgatgcaataccggaaaacattgatttgagaataaaatggggggcataggaagatgatgattttcagcggcgataaatgaataacagggctccttttgataggaatcaattaacgtattgatgatatctgcggtgacaaacggctgatctgcaaggagaatgataacggcgtcagcctcatactctgccgctttttgcaaaccgcattgtatagaatggccttggcccttacccgcttgctcacattctgcctgactccacttatttgatatgggatctaaaaagaaaaaatccgaaagccaatgcagtggatctccctttcctgttataacgaaaatatgatctaattcagataacaaggcatttttaagagccatacttccaagggaaactccattgagaactaaacttcgcttatccgtccccatgcgtctgcttgtaccggctgccaggtaaatggctgctgttttcataagcgagacctttgtgttcgcattttttgaatcatctcgccaacaatgcttacagcaatctcctcagggccttgtgccccgatgggaagtccgataggggaatgaatatcttccggaatctcagctccgcctaatagccgttcagtgcgccttctagggcctaatacacctttataaaacacattctcgttttttaatgtatgtaaaatgatctgatctttttgaaagctgtgcgtcataatgacaacaaaatccctttttgtcatgctcaggccttccatgacttcttccggtgctcctgttatcaaatggccggcttcaggaaaatggccgtgatgacataaagcgggacgccagtcaatcaccgtcacatgaaagcccgcatgagctgccaacgaaactaacggcttcgcatcttcccctgctccgaagacatataaacaaggttttggcaccatctgatggataaaaaataaatcagaggtatgttcatccctcttgattcccttttccgtctgtctcagtttttgaatacggccttgttccataacatccccggttccaaacacttcgccgtcttccactatgtacagatcttccttcggctctaacgttttagtgaatcgtttcattcgggtcacagactttttttcatctaagcatgtcttcactgtcatcagatttcgttccaattccccttttacaggctcaagtaaaaccgtcaaaacaccattacagccaatgccctgtccccaggataaatcgtcttccgcgctcatatcaaagcggacaatcaccggctctcctgcagcccagacctgttccgaccgttcaacgaggtcttcttccagacaaccggcggataacattccgactcttgttttatcccctaaaatcaacatcgaagccccttctttcttataagcggacccctctgttttaataatggtagccagtaccttagcttttttagaagtggcgatgacatccaaaatccggtgtatatcatccatttcatgtcccccgttttacctgatcatatctgcatctgtatatccgtattctataattccagaaaacattacaaacgcttcagcaatttcttcgtttctaaaaaaaaagagtctttatagaccttatgaccgggcggcggatgcgacagcatgtcggaacggagagattccaataacacgctctgttccttctgtttccaattgtctgtttcaccctgttgtatgcctttaaagcccgcaaagtattcacttaacacttgtaaatcattgcccagctcccttttgtcacttgaagataaagctccttctttttcccattcttttaacgttttcactatatttgataaatactcaaatccggcgttcaacttttgcatctctatttgatagcttgaaatgatgattttatgtttttttctgacggggttgaattttaagctgtcagaggctgtttgcagcatctcttttgtcatatgcagctcttgcagaagattgttcattttatacgccatgaggttcccttttccttgtccccactctgattgcacccatttggaaaggtctgaaagtgtgccggaaagctgacgagccaatgtttgaaaagagtccgctgccttttttgtgtagtccggcggaaaaaggaacatgtgaaccagaatggcgatgatgacaccgatcaccgtatcgatgattcggtcgaatgcataatctttagcgtttcgttcaaacgtaaagaccaacaaaatggtgagcgctacctgatgtaaaaccgttacatctattcgcaaccacttggcaatgtaagtaccgcctaataggaacagccccagcatccagccattcattggcaagtgactgacaagaaaggatgttagcatgatcccaatcgcagttcccgcaatacgatgaaaagaaaagcgaattgactgatctatcgttggctgcaaacataagataacagatagaggcgctaaataggggtgatcagagcccgccagttttgccgcttcccaagaaacagcagatgcaatcgccatcttccaaaccaaagatgttttgttttgaatttttttactcttcatcatatccccctcctttcagaaaccttttccactaggtttccgtgacgcaaagggatttatactgtcgtatggaaaatgtgaaagaagctgtgattcaaggggggaattcttgaatgacagcttctttttggggttggggaacattgggaaatgacgcattattttcatgggcagcatttgatatttcagtccaatacagacctaccggaatacgatttagtagtagttagaggttcagaggtgattctctgggctctttttatggtttttttaacaaatcaagtctaattaattacttaatacttgaaaccgaataacgcgcctgaaccatcttcattttgttcaagttcacatacaatatcttgactatttaacttgtctttggaaacatctgaatctattaaactaatgatatattgtacatcattatctttgcaatattcttcaataaattcaagataagatcccttgcgattctcatgcaaagcttcaaaaggtccatcgtgatatagaaacttaaagaaacttttattagagtaataacttaaaatagctagatcaaaacacatacacagcattttccgatatgaaaagccctcatcttcatgtgtcaaggtaccactgtctgttatgataccagcattaaactctacattagatgtagtattagtggaaatatcaattattccattcttgctcgttataacttcaaaataagtcttaaataagaatcttatatcatttaaaaccttatttccgttttctatttttgactcaattgtttcattaattttttcaagtttcttttgcttttcatttatatctttaatatctgttcttgtctgtaaaatgatttctttttgtgtttcaagactctggatgctcttttctttttcaattaaattagttctcaaatttttatacttatttataacatcactatcttgtaatatattcaagatatctgatcgttgtttacctaagtcctttagctttccttcgactaacttaagttctgcttttttatcattaagaagatttgatagatgaactcttctatcttcaagtaaagacttattaaatctaactagttcttcatatgatttttctaattgctcactaaaataaatttctacttcttcaaaaagctcttttatgtaatcgaaattaagaaactcttttgtccctaaagaattttcaataagctcaatgtcagatcttaatttataagccttattttgtaaagaaatcgatttgttttctatctctttaattaattcattactaatctgtttttcatttaaataaaaattaaatgagtcaagatcctcttccaacaattctttttctctggtaagaatatctatttgcccattaattctatcaatatcagagggactataatagtcttccatattttttatctttgttttcaaagcttctatttcatgattcagtttatacttttttaagagtaattcactatcgaatcctagtaattcatacacaaagggtttccatacttggtctttagaacttgagaactttttcaattgaaaaacatcaccataatcattttgagttctaataaaatagcctactagttttcgataatcataatcacataatatattaaagtttaatttctcatttaagattgctgttgctgaaacgacattttcacttgtagtattgagaaccaagtttgtgtaatcccattcatcacaatctattaatactgttgaatagtcgagtattttcatgtctactcttgttatgttcccaaaagatcttctaattgttaaataattgttattgttcaattttaattccagataaaatgtatggcgcttaaagacctttttcttgttataaaaatagtttcccttttttacttccttcagcaacatgaaatctattagatggataagcgcacttttaccaaggttgtggggatcatttgcatttttatcattcacataaccaaaaatgatatttaatccatttttaaattcaatatctttaaatcttgaatcatcgcaatatagtcttgataatttcatattttcatctccaagacatcagattcgatatcatagtttattcttcctatcaagaataaaaaatctactgccggtaaaaacaaatataaggcatcatcaccaatttgcttctctaatgcattataaagctttctataactgcatttgtggtcattttctttgaacagctctattaataaagctaccacatatattaagcttctgtttaattccgtaaatttatccggtctcagcattactaccaccgttttccccgatgtgacatatgtaatacatgaaatgtattatcacactcaccaattcctcattctctaatatctcaatatcattagaatttaaaaatctatcaataatatcattaattacttcgctgaaaaattccttttctctttttatttcaggtatttttctattaatggttttcttaatattattgtaggacttctttaattttttattacgaggatctgataatatatctttaatagttttgaaataaatgctactttcaattatgatattgttgtaatcattacaaccttcttcttccaaattattaattaagttttttgccccaatgtttatcctctttaatccatcatcatcttcaacaccttggttaggctctaactcatcttctagctctaattccaaaaaatctattatcttttttaaattatatggattaataatgtcgcttctcaaatggataattttttggttatatacattaccctgattgttatatactgggctatgatcacctcttgtattatttttactacccgtcatcttccatcaccaaaacgtccttttacatcgccatcgttattaaaaataggactatttcgtccttttgttttgttaatgtttttttgttttatctttattgatttaagaacatagccccctgtagctccaagtataagagtaagtagatgggttataactgttgtccactcaatagtcatttagattcaccttcttaaagaatttattagatatatgtattccgtaaaaattgagacattgattaacacttagttatattcaacaagaaaactatacaatttgtaaatacaacataaaaaacaaagtcatttctctggcctacatacactttcaaaccttatactccccaatactattaggttttaatctcctcctttctcatttggtgaagattcggtaaacaactcaaaaaaagattagtactaaaacgcatatttaaaaccattataccatatattatgaaaaattaagtaattcttaatctataaaattcctaaattactttctaatttctcactgattccccagagtatcatctcaaaaagaatccaactgcttgacctccaatacctcttcataaactctaattaagtatatttcatgcatttatattttcattgcttacatcaatttttgaaagataatacttgtttgctgtttaaattcaaaaaagtctaatccttcttttagttgtaagttggatcaataaaaattatgttatcccatttattaaactgtcatttacttcttagtgttgtaaaagccacatcaccttgaatcattttcttttgagcgaattccgccataactaaaagatatccttttttatagctcatgcctatgaagtggcgaccttgtgactcctcacttcataggatgaacagcttccaatcatccttaagagttacactcacttatgataaggctccccacgattaattcgaaaagcccgataaatctgctccactaaaatcagccgcatcaactgatgaggaaacgtcatcttcgagaatgacagcttgtcatctgcccgtttcatgacggcgtcgcttaggccgagtgagccgccgatgacgaaggtgattttgctttttccataagtcgccagcttatctattgtatcggccagttcttcggatgttttcatttttccttcgatggcgagggcgatgacgtgggtgtccgggctgattttggccaggatgcgttcgccttctttgtctttgacgattttcatgtcttggtcgctcaggttttccggggctttttcgtccgggagttcgatgatgtcgatttttgcgtaggctgagagtcgttttttgtattcttcaatgccttgcttgaggtatttttcttttagttttccgatggtcacaatattgatattcacaggtcatccccactttagaaacaagttattcatatatattgtccacaattgtggatatcttttctgtattttgtgtaggatcattcgttccctactagatatgttgcagtgtccccacataattcacaggctgtggataaactgttagtatgttcgatttttctgatttcgggcggaagctcatgatcatctatgtacatgtccagcacggtttcgatatgttcttcacaagaataataagcggttttcattgttacgtcctccggttttcttttgcacgcggcaattgttctcttttcaatataacctatttatacacatgttagtagtgcttcgggctgagttttatccacaattcggcaaatcacgcgcaaaaagagccggcgtttgcagcatccggctctttacgtgttttctcttttttctaagcgaaggacgaacagaattcctaatagacacgccagcagcgtacagcatacatcaatccagtccggctttccgccgtttaaaaaagagttggttattacggaaaccaggagaatggtgacagtcaccgcggcaagctttttcttcatcggctccctccttcaccgactgtcttcttgttatatagcctgattaagagggtcacaacgatatatacaatcataatcaatgccccgttactcacatcagggtatccaatcaacatattcattatgacaaaaacaatggttatacaaatgacggacaacaataagaagatactgaatgatttcaaatgaccaccttctttcttgcagtaacgtttcattataaaaagcttaccaaaagcggcaagctcttccgaaatgtttatactcttcaaagcccacccatcacctgcacatcatacagcttgagatggcttttcggcgtgacgatgttttttaagtttgggatggtcaggtcgttcagctttttgcccgttttcaggtcgaaggattcgattttggcgggctttttgtagctgtacgtaaacagatacagctttccgttttgatgcgtcagctctttgaagtcggctttcattcgtgatgcggggagcttgaaggcttttttgctttttccggtctcagggttgatgcggtacacgtttccgaagccgtcaacgaaatagaagctgcgctgctccatgaaaaagctttttttgaagctgaacggcatggagtcatagatcgtctgttcgtcatttttataagcggcgatgtcatacgttttgatggcgccgctgtttttcatgactttcaccatttgatagatgtgatctgctttttcccctctggtgacaaagcagacggcgctgtcgtccgcggtgagctgggattcgacagacgtgccttctttatacgtccatgtcgcgattgatgttgtatggagcttctctttatcagcctgaatgtcttggacgtgatagcctttttcgtcatctgtcggcgtgagcgcgaaaagatgatctttaaaaaagcctgaagcgcggatatagtgcggaatgacgtcttgcttccacctgccgtcaatctggcggtacagctctgagcgatagctgccgccgctcttgtcgtagcccgaattatacagcgtgtaaaagcctttcgcccgttcgatatatcccgcgctgtctcccgtatgctggtacgctcttttatacgtgtgaaggccgtcctgaacggtatagattccttttttgtcctccagcagtacgctgccgtcatgcattttggccgatccgagctcaagccccttcatgtgataagaagaaagccgtcctttttcatcggcgaagagggcgtagctttttccgccgccgaacgtgtcttggtcagccgcagtggagaagtacagcagcgcctctttatctttcagaaaatcagggtcatttaatgtgtctctcacaacctccgcaggatcttccgtgcggaaatagaagaagcataaaaccgctgcggcggcgatgatcactaagggtatccaaatgatttttttcacgttgttctccttagtgaatggtcagaatcgtggttgtgtaggacgagcttgtgatgtcgcgcgggtatacgcctaagccgccattagagtcgatatcaatcccggcttttaagaggaatgccgaccacagcagttttgagcagtttttggcgccttcatggcccgtatttctgttattgacgaagttgaaggagtactcatcaccgactcttgatacagcccagtcagcggcggcttgtttttgggcgtcggtgactttcacggtctggacgattgaattgtcttcgacttctctgccgttataagcaatctggcggacgccgtctcccggcacggattcaacaattttatcagcggatgaatacatgccgacatgcccgtgattgtaataagcggtgtatgagttcgtgtaataaatattgccttttgtgcttttcggaagttttttggttcctgacgatccgcccatcgcagagagcccttctttggaagcgattacatttccctgcaccttgtctgccgtgatttcttgatgaaactgcttgagaattgcttctgttgaaacgtgcttctgtttggcaagctctttggcggattggagaacgtcttgaggagtcgtgccctgctgaagctctgcgatttcttttgcgtagcgggctgtttctgtttctttcgcttttacattcataccggagaatgacagaaccatggtgaatgacagggccaacgggaggacggctttgaacagctttttacacatattacttcgcctcttttctttgagtataatttttccacatttgtattatatgacggaattgcgataaaaaaatagataatttacagatttttaaaaattttataacaatatataaatcatatgcataaaacattttcaaatatcaggaaatccggttatcatacaagaaagggggaggacatatgaaggacagaacgatcggttcgatgcgggtttccgcaatggggttagggtccatgggcatgtcggaatactatggcagccagagtgaggaaaagtcgatttccaccctgcatcatgccgttcatctcggcgtgaatttgtttgatacggctgatcaatatggattgggcgcaaatgaagagcttgtcggcagagcactcgccccattcagaaaggagctttacctcgcgacgaaattcggttatgtccgaagcgaaaagggtgagtttatcgaaattaacggacggcccgattatgtgaaaaaagcgtgtgacgccagtctgaaacgccttgggacggattatatcgacctttattatctgcaccgggttgatccgcgggtgccgattgaagaaaccgtcggcgccatgaaggagctgatagacgaaggaaaggtgagatatatcggattgtcagaggcttccgcagaaacgatcaggcgcgccgtccgcattcacccgattgccgcgcttcaatcggaatattctttatggagcagggaagcggaggagcatgtgctgcccgcctgccgtgagctcggcatttcatttgtgccttacagtccgctcggcagaggttttctttccggaaagatgacgtcgaccgatcagctggatgccgatgattacagaagaagaacgccgagattccagggagacaatttggcggtgaatatagggctcgtccaaaaacttaccgccattgcccgggaaatgaatatcactgctcctcagcttgcgctcgcatgggttctcgcaaatggcgatgatctcattccgatcccgggcacaaaaaagaaacactacttggaagagaacctcgccgctctcgacattgtgcttcccgaggatgtgaaggcgcgtttggatgagatgtttccgatcggcacggcggccggcgagcgttatccggaacacatgatgacattgttagatgaataacaaaagaggcccatcgtgcgggcctcttttcatgacagctttttgctcatgatgacatccgtctccagaaatccggtcttctcatacagcttccgcgccgtttcgttatgagcgaacacatggagagaaatcttgcggacacccaggtctttggctttgtcctccagccttgcgagcgcctctttcgcatagcctttgccgcggaaaggcggatgaaggccgaaatcataaataaatgcgtcctgctgcgggtggtccggatcggcgtgcagccacagccagccggcattttcctttccgtccaatgtcagcgtccataaatagtgatcggccgtctccaagccgtcaggaagcaggtcattaaacgccagctccgctaattccggcgcttcgtcaggcagccacgttcccgcttttaccttttcttcagcgtaatgcttggttgaatgggcgagataggactgaaattcttgttctgtcatcggctgcagcgtgatagccattgaatcactccttacaaaacacagactgaaagcggtatcatgaagtattatccgaaggctccgttttccgccggttttatgatttgttcggcttgtgccgttgaaccagtttgcgcaaataatccaatcgaaatgagacttgccaaggctgctgagagtacaatgaatttacatgttttcattacgaatcccctccgttaatctcaaaatttggtcattggcatcaattgattcttgaaaatacttcgccgccggtttgtaattctcctgttttttaaaatgcgccgcggcctgatacgacaagtcggaaacgtcactccacagctctttccttcttaactcggcgaaagctgattcaagcgcttcttcattgcggtcaataaagacatgctgtaagatgcgcagcttttgggtgtatacgggctcgtttttttcttcagcggcattcagcgctttatgcagccaaaaccggccctcatccgcctgttcctgtttcaataacactctggccagcatgtacagactccgcaccgaatacgctgattgcaaatgctccttttgatcgagagccgtttcaaactcgacccgcgcctcctcaagcttttcctgtctttcatagcaaatgcctgcgttaaagtgggcgagcgcctcaatatgcggatcgcccgctttggcggcttgatgaaccgccgtctgcaggagctcttcggctttctgatagtgaaacaagtccattctgttacagccgatcaccattaaacactgtgcttctctgaccgcgtacatttcattggctttgtagatctccaacgctttttccgcgtggttcatcgcaaagtagttttggcggatttcatagtaggcaatcgccacttgataattaaactcggctctttcaatctcattcggtatgtgccggagcctgctttcagcaatccggtaaaaattaatggcgttcataaaccgtttacggtaaaactcgtgcattccggaaaagaaataataatagtattgaatcatctggtctgttttttctttatcggcgttcagctggatcgtttttaatatgccgtctgttttctcatactcttccatcaaaagcttatagcgggaatcaattaaattaaaataaaggagcaccgtttgattttgtgtcatattttgcagatccgtaagcagttgttctcttaacgcctcagccgattcggtgttgtgctttttgatttcctcataccagtcactgatttttttcgcaactgtttcgtgggccatcacttcagccatctgtcaggacacctccctttcccattttgtgtaataaatatatcatatttacaggttcaaaaagagggtggcagcccgctagtttcctcgtggcaacaaaaaaacctccgcaggtgcggaggcgcatattttataacagtttttttcctaacaaagattctaccagctcgaccgctgttttgccggttttgtttttgtgatcgaggatcgggttgacttcgacaaattcagctgaagtgatgatgtcggcatcatacagcatctccattgccaaatggctttcacggtagctgatgccgccgacgacaggtgtgcctacgccgggcgcgtcgctcggatcaaggccgtcgaggtcaaggctgaggtgaacgccgtcacagtctgacaagtagtcaatggtttcttcaatgacctttgtcatgccgaggcggtcaatctcatgcatcgtatagaccttcatgcctgtttccttaatgtactcacgctcgccttcatcaagcgatctcgcgccgatgatgaccacgttctccggcttgattttcggggcatacccgcccaggttcaccagcgtgtcgtgcccgacgccgaggctgacggccagcggcattccgtgaatattgcctgacggcgatgtttccagggtgtttaagtcgccgtgcgcgtcgtaccagatgacgccgagctgtttatagtgctttgccgttcctgtcagcgttccgatcgcgatgctgtgatcgccgcccaagacgagagggaaccgctcattctcaatgacgctgtccaccttttgggcgagctgctcgttccccgagagcacagagttcagatttttcagctcttcatcatttttgagtttttcacgattaacggggatgtcgcctaagtcttccaccgcataccccatgtcagataaccgttcaatgagatgcgcgtagcggatggcgctcgggcccatgtccactccgcgtcgtgcttgtcctaaatccatcggcattccaataactgagatattcttgttcatccgtttttccacctcaacatgttgtatgttgtcctgtgcgggtttatcaaagatgacttggacacgaaaagatttaaagctctatctgtttttctgactgcttatgcttttttacatacagatgatagacgataacgcacaccgccatgaacgggatgccgcaataaagggcgagccgctgttctgaatcaaatgcgagactgatcagaacaaccgtatttaacgtcagcccgataataggcagcaccgggtacagcggtgttttaaacttcaggtcttccactttgccgccttcgcggatgtatttccgtctgaacatcagctgcgacagggaaatcgtaatccagccgacctgcgcgcttagtccggctaatgataagagaaacatataaacggtttccggcgcagccaccttagacagcagtgacaggcaggcgacggccagcgtcacgatcagagcgttcatcggcacgccgcgtttatttattttgccgagcgatttaaaggcttgtccttcgttcgccatggcatataagatacgcgtcgatgcaaacaggcctgagttggccactgagagcagcgcaattaagataacaaagttcataatatcggcggcatatggaataccgatttgttcaaacaccacgacaaacgggctttcgaccactcccgcctgcctccacggaatcatgccggcaatgacgatgatggagagaacgaaaaagacaagcgttctccataccgtctgccggatagagcgcggaatcgttttctcgggattttcactttctcccgcggcaaccccgatcagctccgttccctggaacgcgaagtttacggtaatcatcgtaataagcatagccttaatgccgttcggaaacaatccatcctcataaaaatgagagaagaaaggagcctgctcgccgtgtttcatgtcaatcaggccgaacatggcggcgccgcccaaaataataaacagcagaatgactaaaattttaataccggaaaaccaaaattccgactcagcgaacgcttttgtggtaatggcgttcaaaagaaacatcagtccgacaaacacgaggcaccacacccatacgggaacatgcggaaaccagcggagcatcaattgtcccgcagataaaaactcaatggcgcatgtcaccgcccagccgagccagtagagccagccgaatgcgaaaccgaaagcggggctgatgaatttggttgcgtacgtctgaaacgaccctgatacgggaagggcaaccgcaagctcgcctaagcagagcattgtcaaaaacataataaaaccgccgaccagataagacagaaccgcgcccagcggtcccgcctggttaattgtaaatccggtactcaggaaaaacccggtgccgatcactccgcccaaagaaatcataaacaaatggcgtgatttcattgtgcgctgaagctgattctctttttgatttgtattcactattctgcaccccttcagcaacttgtattggaaccaagccggtgctttgaaaccgatttgctgtccaaagagcctctatttgtatatgaatgttatatgaaattcattttcgtacataaagatacattatactaaaatactgtcgccacgcaaatagagtgtgctgaattttttatttgtaaattccatacaagccgagggaaagcattgccgcatcaaggttttacgcgttttgaagcacgtttgtgatcttttggatcgcccagtccaagtcttccttggaaatcattaacggcggtgcaaaacggatcacggtatcatgtgtttctttgcataaaagcccttcgcctttcagcttttcacagtacgggcgggccgcttctgtcagttcaacgccgataaacaggccgcgtccgcgcacgtcttttatgatcgggttatcaattttctcaagctcttctttaaaataacggccaagctgaagggaacgctctgccagcccttcttcctcaaggacttcaagagatgcgagcgataccgcgcaagcgagcgggtttccgccgaatgtcgagccgtgggaacccgggttaaacacaccgagaatgtcacggttcgccgcgatgcacgaaatcgggaagacgcccccgccgagcgctttgcctaagatgaacatatccggtacgatattttcccagtcaaccgcgaatgttttccctgtgcggccgagtcccgtctgaatttcatcagcgatcagaagcacattttcttccttacaaatggcggccgcttcttgtaaaaatccttccggcggaatgacgatgcccgcttctccctgaatcggttcgaataagaaagcggctgtgttcggcgtgatcgcccggcgcagcgcttctgcgtctccgtatggaattaattttatacccggaagcataggtccgaaaccgcgtttatactcatcttctgaagaaagggataccgcaagcatcgttctgccgtggaagttgccgatacacgcaatgatttccgcctgattatccgctactcctttgacctcatatgcccagcgtctcgccgctttgacagcggattcaacggcttccgcccccgtattcatcggcagaatcatatcttttccggtcagcttggctgttttctcataaaacggaccgagctgatcattatggaacgcgcgtgacgtcagagtgattttatccgcctgatccttcagcgcctgaatgatcttcggatgtctgtgcccctggttcaccgcagaataagcactcagcatatccatatattgattaccttcagggtcttttacccaaacaccctgcgcttcggaaataacaatcggcagaggatgatagttgttcgcgccgtaatgtgaagtttggctgataatttcttgagattttgtgaaagctgacataatctgattcccccttgttttgtaatcattcaacattagatcttgctttccctttttataaagcaagttccgtgccaatccgaaaaaacgggatgtttcgccagcattctttcttttcccgcaaaattttccggcagtttgtgtgcaaacttcagccaagcgcaaaaattttttgcgtttcccgctgacaaaataggagcaatccaattagattgctcctactcaacagttatttattcaattgtctctgatatacaatgtaagaatatagtaaagataatatgatacagccgatcgcagacatgaaaatgactgacactctatacaccggcggcaaaaaagctgcaagcatcatgagcatgcccgctaagacaaaaagtttcgaactaaccctgtgtgtatccttccaaactctttcactgctcagcgtccaaggtgttcttatccctaaaaaaaaattaggcttaacgatctgaatgaagtttccaaacaccatgaaaatgactcccactataaagtttcctaaataagatatagggagatcatatcccagaccggtaaagatggtaatcagattaatgacaaacagaaccgcaaacattgtattaaatatagccatatatggcctgataaatgttttgtagttatttttaggatcaatcttagggatgataaccattaaaatatatagaataatcatgatgccaataagcatcatcatcgcattagctttcgtttggtaatcatttgcacttccgtttaatccccagtgtgtcgccaaattgtccggtaaagatgaatatgtgcaaacccatgtgaaaacagttaaaactatgattcctgctgaaaagagatattttttcatgattccccgcctttcttattatcatgttctgaatcagtcagagaaaagaaccagcctataagatcctgtaatacagtggtatttaatgaatacataataaattggcctttcctctcatcgtgaaccaaatcagtatttttcaatatggtaaggtgatgagaaatactgggttttgacatgtcgaagtgttccgcaatttcaccagccgtcatgtcttgtttctttaataaatccaaaattcttctccttgtaggatcggccagtgctttaaaagctttattcaaaaactttccccctctcatacatacataatttagatatttaagtatatatctaaatatcaaccattttcctaaaaaagtcaatggttttattacctcaatttccatttatttttaaacattgtccaagcgcaaaatttttttgcgtttcccgttcgatttattttaaaataatgaatgttaagacgattgagaggaggaattgacctgcacacaaccagcgaattttacacactcgtgttacaaagcattttggaagagattgatgtcgggctgcatgtggtggacgagaagggcagcaccgtcatttacaataagaaaatgatgcagattgaagatatggatgaacgggacgtcctgcataaaaacctgactgatgtatttatgttttccaatcagcaggacagcacgctcgttcaggcccttcaagaaggcaaaacgattaaaaacgtgaagcaaagctatttcaataacaaaggccaggaaatcacgacgatcaaccacaccttcccgattgtgcaaaacggcgagatcaagggagccgtggaaatcgccaaggacgtcaccaagctcgaacggctgatcagggagaacatgcacaggaaagaacagaacagctacacgtttgacagtattctcggcaacagcccggtcattcgggaagtcatcgaaaacgcgaaacgggcaacccgcacatcatcatcggtgcttttggccggcgagacgggaacgggcaaggaactgttcgcccaaagcattcacaacggcagccagcgctcaggcgccccgttcatctcacaaaactgcgccgccctgccggatagcctggtcgaaagtattttattcggcacgaaaaaaggcgcctttaccggagccatcgaccagcccggcttatttgagcaggcgcagggaggcaccctgctcctcgatgagatcaactcgctcaatctcagcctgcaggcaaaactgctccgcgcccttcaggaaaagaaaatcaggcgcatcggatcagcgcaggacaaaccgattgacgtccgcatcatcgccacgatgaatgaagacccgatcaccgccatttcagaagagcggctgcgcaaagatttatactaccgcttaagcgttgtcacactgatcattcccccgctccgggagcgcaaggaggatattctgcctctggccgaagtctttatccagaaaaacaatcacctgttccaaatgcatgtcgattcgatcagtgacgatgtgcagcgattcttcctggaatatgactggccgggcaacatccgcgagcttgaacatatgattgaaggcgccatgaactttatgacggatgaaacgacgattacggcggcccacctgccttaccaataccggatgaaaatcaaaccggctgacacggaagccaaagccgccgcaagcacccagcccggcaccgatttaaaagacaaaatggaaaacttcgaaaaatacatgatcgaaaaaaccctgagaaaacacggcaataacatatccaaaacggcaaaagagctcggaatcagcagacagagcctgcaataccgcctgaaaaaattcggtctggaccggatgaaatgaatccatacaaaaaaaggctgagatgctcctcagcctttcgtttatatctgattggcaagccgctctccagtaaaccaaaagttctcactcactgccaatgtatgttccgtattctcgacttgatgccaccaatggcgcggcgcgtaaatgatttctcccgccttttgtctgaaacggatcggagacgccttttgcaccagcggtttttgctcaatgtctttttcatcaaagacattgatatttccttcgtacaaatacggagagtcgtccggatgatagaagatccattccttctccccgaaaatgacgccgttccacgcgtgcgtattgttaaaatcctgatgcagcggtgtgcctgtctgcttagaaccgagaaagaaccatttccagtcccgtcccgtttcttcatccgctctcaatgtgtcttttgtaaaatactcgggtgcggaatagacaaggtctaagtcattttggttcagctgcgtaaaattccagtcacagtaccatttgtcatcattctgatcaatgtactcgatatagttggaaagctttacttgtttaaacgttttgaccccttcgatatctgatttccggatggtgaccattctgtccccatagtgttcgtcaatgtattcaagcgtccacggcctgcattcccagtgatccattgcccccgtcaaaataaaaggtttcttatcagcatactcgcttacaaaaagatcgtacgataactcattgattgtcagtctgtcaatggtcatatccattccccttttattcggcaatctgccgttttttttgtttggcgtaactgtatggacctgaaaagatggtgacgttttgattctcaagccagaaaatcttgttgaacttctccagcaggtttctgtcgtgagaaacgcagatgatggtgccttgaaactgcatcaggctgttttcgagaatttcctgagattcaatatccaagtggttggtcggctcatccaggatcaggacattcagctttttttccattaagatggacagcttcagcctgattctctcaccgcccgacaggacggaaagttttttaaagaccgacgacccgtaaaatccgtacttggccagcatattccgggccatgccctcttcagtcagcagattttctttaaaaaattgcagaatcgtctgactcgaatctccgacatggctcttttgatcaatgtagcctattttaagattttctcccactttaatggtgccgtccgacagttctctttccccgatgatgcagcggatcagcgttgttttgccgacgccgtttctgccgacgatgccgattctgtctttatgctttatgcgcaggttcacattttgatataaaagggaagatccgttggtcacctttccgttttcaatgaacacaatatcttttgaaccggcgcccgcttcctgaaatgcgttttttaatttttgctctgtccggaccggcttattgatcagctcgatccttttcagcgccttttccatattattcgcgcgtctgtgcaggccgacagacggcggatttgagcggttggcccaatctctcagctgggcgatggattccttcatcttctgtatttttctctgctgttcttcatatttctcaaactgggcgatgatgaattcttcccgctttttcaagtattcgctgaatccgtaaggccaaatcttcacctcggtatcgtcaatctcgagcaccttcatcgccgtttggtcggcaaacgttttatcgtgggtcgtaaacagaatggttttgttcgattttttaataaacccttcaagccactcaatcgcatggacatccaaatggttggtcggctcgtccagcagtataacgtcgtcgttgcggattaaaatttcggcaaggccggcttttgttttttcgccgccgctcagctttgaaaacggctgatcctttaattcgctgaggctgagcccgttgcatacctcgtcaatcatcgcatgcatctggtagccgttgttccgctcaaatgtttccgtgtattgactgtacttttccaataaagcagtcagctcgtcaccactcatcggttctgaaagcttcagctcaatggccttcatttccttctggatcgccgctagagcttcaaacgatttttccagatattgatacaacgtcagatcctcatggggatcagcgatctgcttcagcaaaccgaccttcgcccctttgttgatcgcaattgttccttcatctgcctcaagctccccggaaagcaccctgaacagcgtgcttttgccggaaccgttcggcccggccacaagcactttctcgccttcattgatgaaaaaagaaacttgtttgaaaatggtatctcccgctaaatttaccgtaagattatgaatattcagcaactcacatcatccctttgtcattctggttcaaagctcgactttattctggatggcgacgctcgctttcagtttgtaaaagctgagcatcataaacagcgacaataagatggataataccccgattgcggtcagcagcaaagctgaatcaaaatagtccgttaagaatccgataaacggaaaggcaatgaacatgaagagcgaggtcatcaaactgataatggacagcagcgtggctctcgttctggacggaatctcattattcaccacctgactggatacgggttctatcacatcatagagcgcgttaatgacgacaaaagctgcaatcgtcacgtacagactgcccgaaggtataaacaggtaggccgccccgatgatgcagaatgtcagcagaagcacgcgcctcggcgtgaatttttccgccggcttggaagaaaagatggagcacagcgcctgcaagatggacagtcccgcaaaaataatggatatattgcgcacggacagcccttcctgacttaacaaatcttgtccgtacatataaaaaaccgatgtaatcgcaaagaaaacggagagtgacagcaccagatatttaaaggctttgttcagcctgaagaaatctttgacttcttttaagatgtcaccgaccgtctgcgtttcgtgttcactgttttcaaatttaatttccgtcagctgtgtaatgaccgccattgcaatcagctgagtgacaatcccggcgataaacacatacgaccatgatatttcctgcaagtagccgccgatgcccatggcgatcgcaagaccgagtatgacaagtccgttataatttccgatggatttgccgtaccacttttctttcccttgttctttcagtgaatcaaacaaaaaggcatgatccgttcctgatataaacgtcagcccgataccgtatataatatgggcgatgaagagggcgatgaagttatggaagctcaggaacatcaccaaatagacaatgaccataaaatggccgagcaagagcgatttttttctcccgattctgtccgagatgacgccgctcggcacttccgccagaaacatcgccaaattcaggaccgattgcaggatgcccacaagaaacaatgaataattcatacttgttaaatataaaatccaaattccccgttcgaaaaagaagtttccgaaaaaaccggagaagtaaagcaaatttcgattccgcaaatgaatacccctttccagctatctgcatttaacatcatgaacagaaaggagcccgtcagtctttacactaaaaccctctatacatggatcttgcagatacagacttttcccaaaacaaattgggcaataatgagttgtattctcgaataacccaaaaagttccttctttttttcagatcctatggcatcaatgatcgtttttttcttctctggatcgctgatgtcgcggatgaaatatttgatatagctcagctcatgcatgtaagccggcaggaacaaatggagctcaatatcaaacccgcttttatccatatggtaataatcattgaaatgactgacgcgggagacggacacgtccgctccggcccgccgaaacaaatcagccagcctttcaataatctctccgttgggataataatcggcataaacgattcggatcggttcttcttttgtcaaaaggggcggatctttctgcggtgtcctcccgctttcccatataccgatcagtgaatcagtcggtgtgatgatatgccccaaatccccggccagcttttgtttatcaaaataatgctgaataaaagttctcagcatgtcgtcctttaccttgaaggtaaataacatcggcaaatgattttctttaaaatcagcatactgccgatacctcatgtttgaatgatgaaactgggtgtggcaggtcacgtccgtttgattcgcttcgtacagcccgatgcttttttccagatcatcattcaaaataaattggatggtctgaaccgtgcggtgatccgcgggcgtcattttatattgcggattccgctcaaattccagccccttctcaaacgtgcgcttgaatcggtacgggccgttttccggcacatcgcccccggcggtccccggaatcagaaagctgctctgcaaaacggcttctatctcatcagacggctcgtccaaggtgactccaaagcgtttttcgcctgttacgttcaccccgagctgatcggatgagacgaggccttttacatacggaacggcctgttttatgttcaggaaactgccgagatgggggctttgattttctttcgtcagatgatagatgatcgtttgaaccacaccctcggcgtcgcctaaatagtccgggtgaatgtccacctgacaggtgcggggatctttgcggatgatccggcagttatagccgtcctgcagactttcatacataatgctgcaaatcatcttgcttgtgtaatcctgcgtatctaatgggttcaagcgtatcgggcttgtgtcgatttctatttttagagggtcgcccggttttctcgccgtacgatgcatcgtcttcataaagcgctttccttttgagaaagcttcgtttctgtaatatgaaggccgtcaaagtccaggccgatgcgggtattcagggatttcgggcttccgcctgcaaggtatgtgataatgtcatgagacataaacgaggatataataccgtttgtcgctcctaaggaacctttgatcggttcatcggggtaacagttcagaagtccggccggcatgtttttttcataggtgacgccggattgataggattcaggcgtgagcagaggcccccattggccgctgaagctgccgacacccccggtcataaacgcgatattccgctccttacaataccggtaaacccattcagaaatgttatggggtttgtcagcggcatttatgacgatatcaatttcatacggatctaacacacgcaggtcctgcggctgtgtcatttccttatggtaaagtgctgcgtccgcattggggttgatacccgcaatataatctctgcattctgagatctttaatttgcctacagaagattgattatagacgaattgtctgttcaggttatgtactgatacggcatcgaaatcaatgagaataaaatgctgcaagcccgccgccaaaaggttttgaagaatgatcgttccgacgccccccagacctacgatcgctgccctgctgccgtctaatctcttttggatcagattggggttttggttgtatttctcaaaatggtacagctgcttttcagtgatgcggccttcacggccgttttgccatggctctattaaagcatccaatttcattaatgcatcgaaaaaatggtttcccgcttcctctcccagaagatcagaaagctcttgtttttcacagccgatgatcagccgttcaaccgcctctttgatctcactcgtatgcgcaagcttaatcgcctttcgattttgaatgataatatgcgccgtgtaggtcagcacctgcacgctgtctttaaacttccagcgcttacagtccgttgacatcatgacataccccctgaaagataataactccccaatgaggggagtcacggctttactagcagcgatgcaccaagcttgctgtttctgtatcaagatcaagttcttcaatcttcatcagtacacaccccctttaccaataactagatattatcaccaatattggaaaaggacaagttattttttgaaaatttagaatttatatataaattgtgatttttcttccttctgcccggtttatcccggcagccggatgatgaacacggagccttttccctgctcacttttcacttcaattgttccgttatggctgtcgataatggtttttgtaatggtaaggcccagccccgcgccgccggattgacgggatcgggaggtttccgccctgtaaaaccggtcaaacaaatgagggacatgctccggagcgattcccgttccgttatccgcaatcataagcatgattcctccgtctttctgcagggagacggtgatgacacccttgtcttcatccgtatgctgcaccgcattgtaaaagaggttgagaatgacctgcttcattttgtctttgtcaaaaacggcttctatcttttgatcgacaaagaactcgagcttccggtttctcgcgagcagcttcagctgagcctccatttccaaaatgacgtctcccaatgcgccttttttcatttcaaagctcggcacccggtcaatcttcgcgagaaacagaagatcctctatcagcttattcgccctggcggattccgcgtacatgctttgaagcgctttttctttctgctccggcttctccgccgctccgcgcattaacatttcgatacagccgtgaatggaggtaagcggcgttctcagctcatgtgatgcgtctgatacaaactgccggatgcgctccttcgcttctttttccgcctgaaaagaggtttcaatccgttccagcatctgattgatggagatacccaatgactcaatttcggcctgccttttatcaatcggcagccgtttatcgagactgccggcatgaatgtcacccatcatacgcacaatgcgggacagcggcttgagtgtgagccggatcaccggcaagaaaacaaacaggccgatgaccaaagccgcaaaggaaagcaccgcaaatatgctgatctggcggaaaagcgaatcattcaaaggctgggtcagcgtgctcatctgcacaactcccgcctgccttccgtcaacggaaatcgcctgaaacacgacgatgatttcctgacctgacttattgtgagccacctgatagtgaagcgccatggtatctgtcagcgcatcccggtacacttttttcgggaaagaaggagcagcccccgcgtgcgggtcttctgataaaacagacatcttgtatgattgattgataaaagcaaccgtcaccccggggtaaatcaaattcggatgagccggtgtttcggaacgggcaagggttttgatggacctccatacgctttgatccattgaattgatatcactctgaatgctgatcgcctgattttcatacatcgtccgtgtcataaacatgtactgagtgccgccgatgaaacataacagcaaagccaaaatcgccagtgacctgaacaggagctggaaccgcagggttctgtacagccgtttcattccagatccaccctgtacccggcgccccgaaccgtgcgaatcaccttgtgctctttgtccttcagcttttcgcgcagagaacggatgtacacctcgacgatattgtcttccctaaggaccgttccgtaatgaagccccatcgttaaagaatcaatgagtgcagactcgccgtctgcactcagcttgatgcctttcaacttttccatgatgcagtctctccttagatgtatcagcctgtgtttatttttttcgcttccccttctattattcgcttttatctgaaacaaaacggaatctaagctgaattggtgaaaggaaacgctgaaaacggagcaatctgcaaataaaaatcattatctgccgcttcaattcagcagcaccagtctgtttcaatcacaaagttctaagttcacgtctacctttttctacatatatccatttttaactgaacgtgttgtgacccgcgttcagttcttttttatggcttctgaaaaacggcataaaaaaagcgccctgaaaaaggacgtttaatataacatgtttcatgttcttaaattctgcattctaaaataattcttccttcacattcaccttcaatttcattcaatacgatgatcacatcagccgttttcatgtgtgtcacctcccgttttcataatagtataatattaacaaataaatcaataaaaaacagcccggttgtccgggctgtttttttatttctgtaatcgatccgcttctgtcagtttgacttccgctgtttttttctttcccgaacggtagaacgtgatgttcacacggtcgccgatctttttgcgatacaggcgctcacggagatccacaacgtcattgaccttatgtccgtcgaacccggtgatcacgtcgagctttttcaaacccgcttttccggccggtgaaaacgcgtcgacacccataatgaccgccccggttttaacgcctttcggaagtttcagcgtctggctccaatggtagctcgcaatatccgttaaggatttcatctcaataccgaggaaaggccgtctgacttctccgtatttttctaaatcctgaataacgggaatgacaagctttgacgggatggacaggccgatgccttcaacggcggattcagcgatcttcattgagttgatgccgaccaccttgcccgatatatccatcaaagcgccgccgctgttgcccgggttaatcgcggcatcggtctgcagcacttccgcattccaatccggctgtccgtcgccgtttgagtcaacgggcaccgccctttccgtgcctgaaatgatcccctgtgtcactgatcccgcaaattcaagcccgagcggatttccgatcgcaatgaccggttctccgactttgacctgatcagaattgccgaactgggcggccgatttgattttatcagactttaccttcagcacggcgagatccatcagacggtcgctcccgatcagctcagcaggcacgcgtgagccatccttcaggctgatctcaatctcagtcgcaccttcaatgacatggtgattggttacgatataagaagtgtttccgttctttttgtaaatgacgcccgacccgcttcccgcttcgccgccctctccccaaatatcggtcttttggatattgagaacgccgactaccgaatctgatacacggctgaccatattcgtgacagcgtcattgacatttacgttgactgttttcacctgttcgctgccgagacgctggctggtgcttttgctgctttccccatgatctccgcctgtccagtacggcagcaggaaagccatgagcgcggccccgacgatgacgccgatcagacttgatagaaagtaccctctcttgctgcggcggggctgttcggaggcgtactgttcatcatcgcgattataatccaccctatctcaaatcctttcaagagtactcgatttgcttatagtgtgggtcagatcgcggattaataatcatgattcatttggaaaaattacacggcgcacagcggcgtcgggattttcggatcggtatcaaataactgaaacgtttccccggcgacaaatcctttcgcagccaatgtctgctgcacggacattctcgccagttccttcatattgttgtcttggctcagatgcgccaaatagatgcgcgatgtgccgtcgccgatgacatcagtcatggcgagcgccgcatcttcattggagacgtggccgacatcgcttaaaatccgccgcttaatgctccatgggtatctgcccatttgcagcatgccgacatcatggttgctttcaaacacaaacacattggccgaacggataatgcctttcattctgtcgctcacatacccggtgtccgtcatcagcgcgagctttctgccttggtagtggaaaacataaaacatcggctcggccgcgtcatgagagacgccgaatgactcaacatcaagcccgccgaaggatttcacgctttccatcgggaacagaaacttttgtccggtatccagcttgccgatctgattctccatcgctttccacgtcttttcattggcgtagacgggaagtccgtactttctcgcaatgacgccgagccctttaatatggtcgctgtgctcgtgagtgacaaagatgccgtcgacgtcgtctatcttgcggccgattctctccatcagcccgtccatcgctttaccgctcaggccggcatccaccagaaaagagtgctcctctgtctccagataaaacgcgtttccggtactcccgctcgcaagcacgctaaattgcaagcccattatgtctcactccattatttattttgattgttatcaatgactgtgctttccaatgcattcacagtgtacgtttgctgtgtctttttcttcgtcccttttgacttatcttcaattgtaattctccataccggcgccagcacctgcgtacttgtcagcggatattgggcaatatagccgaacttaacgcttttaacggcgcaattcgcttttaagtaattttgagaatacaataattcgaccgcatcaagctcaggaatcaggctctccgtctggattcgcttgaatgactccagcatggtctgctcgtaagatacgacctcgtttttatcgttcaaatgcagaatcacctgtccgatcgcatccgtggacgagtcaaaatcctgataaataaactggccgtcatacatctggtaaaaaatgatctgttttttatccttgtcgactttccacagtttatatttttcaccgccggttattttagagctgacgagcgattccgcatcctcttgcggtttttgcttcgataaaccgaccggatcggtaaatttcattttcagcgtcgtaaccttgtgatcatccgccggcatctccattaacggcttttgatccttcaaagcatcaatatcttcagcggtaaatactttttggcccgccgtcagccggtagcccgtcgcggaatcagaagacaggttgccgaaagtgatatgatccatctccatgtctttttccacatttgaatttttaatcacttcgtattcactgctcgagcgtttttcaaaaaactgatagccgagaaaaatatcaaggatgaggaaggcaatgatgaagatcgtttttgtcttattccactccattatcgtcctcctccttccccagcagatctttcgtaatcggaacgatcttcccgttgattttcatactccagacgggttccagttcaacgagatcattcgttgatgaagagaccatttgataggccaggaagatctggtcgattttattcacgtcgtatttatcctgctgctccagcagagacacaacctcattgccgttcatcatttttacgtcttttgttttaatcggattcggtccgagaacatagttcggccgcttgtagctgagaacctcgtcattggcccattgcagggtcaaaacaggtccggatccgaaaggcttagacgtgctgttgatcacaggcatttggtctttaaacatgtagaaactcagctgctggttatcactcacattgaaaaattgataatgatccgtccagcttcccgtatcctctaaatacttatagcttttcttaatcagctcccctgtttgataagaagcgctttgtgccaggttccgatgctggaattgaatctgccgctgtgtcgaattgatttccagacggctgattccgtcagtcagcacattccgattgtaattcgggtcttctctgaccgtgctcggatcattaaaaagcgtctgcttaaacaggttcgtcttaatggtttcagtgataaattctttttccttcatattaaatcgcgcattcggcatgagaaattctttgctttttccgaccgaatagaggtggtataacggcatactcgactttttgctgtacagctcattcatcagattgcggtaattcgccgattccacagtcacttccaaaatcagctgcttgctgtatgagaccatgtaaatcttcttatttgtcttattctcattaaacggaatgacaatatggtcaaatgagctgtattccattgacggattcgaccatttaaacatcgattggaaaaaatcaatcggaatggtgtcattgaattgcagatcgagctttgccgaattgccgtttctgccgtaaagccaatttttaaaaccgagcttgtcgtattgatcggaaatatccttcatcccttttacttcccattgcggcaaatccgcccacaggtcattaaagagcgtctcatcatccactttataatgagagccgtttgtatgaataaacatatcccggggttttaccgtttgcgacactttttggctcgttttatcaattttatgcttttcccggacagtcgatttggttgaggccgtgccttctgaaaaattgggctggaatgtccaaattccccatgttaaaacaagactaatgacgaccagcactgacagtatgactgtttttatattttcacgcctcatcccaatcatcctcttgctcttctttatatggaagagtaaatgtaatcttcgttcctttgccttctacactgtcggcccaaatgtctccgccgtgcgcctgaaccatctcttttgcaatcgcaaggccgagcccggtgccgccgagttttctcgtgcgcgctttatccactctgtagaaacggtcaaagactttttccacatcttttttcggaatgccgataccttcatcttttacgctgatataaagcagctcttctttctcattcacatcgactgagaaagtgacatgtccgccttccggtgagtatttcagtgcgttagaaatgatattatcgagaacctgcgtcactttatcctgatcaatctccacgtacagatttctgtccggaagctcgcggataaattcgacatgctgttctttcgtcatttcaaaacgatcgataatcagtgacataaagcggatcatatgaatccactcccgattaaactgataatctttgctgtcgaatttagaaagctgaagcaggtcgttcaccaatctgatcatgcgctcagtctcattttgggtcaccattaagaaacgcggagcgatatctttgttttcccacgcgccttctgcaagcgcctctaaatagcttcgcatggtcgtcagcggtgtccgcagctcatgagacacgttggcaacgaactctctgcgttcccgatcgagtttttcctgttcggtgacatcataaagaaccgcgattaaaccgtcgatttttccgtgctctctctgaataacggaaaaattcacccgcagtacagtcgtttcatcgtcacgttcgatctccagcagcatggaatcctgctgttctactaaatcctcaaatgtaaagttctcttttatgcctaataaagacgtaatcggcatctctaaagccgtttcacgtgaaacattcagcagctcaagcgcagggctgtttaaaagaataatagctccattgcgattcgtagcgatgacaccgtccgtcatatacgcgataacggaagaaagctttcttctctccccttccgtcatggcttgggcatcttcaagctctctcgtcagatggttgaacgtcgttgcgagctgaccgatttcatcatgcccgtatttccgcacctttctggagaaattcccttttgccagttccatcgcctgcttacgcatatctgaaagcggatgggtaatggtgcgggcgagaaatataccgagaagagccgtcagaacaagggctaagcctgttccagaagcaagaatcgagttgacggttttcatctggttaaaggtatcttccatactggccacgacatatatcgcgccgacaacttcctgattctctgtgacgacaggttttgctgaaatcagcactctgtttttgcttttaggatcataatatttttttgaataggcctgttttgttgagaaaatccgtttaaaaatcgggtcagtcgtctgtttccccgctatttcctcgccataaggcctcgaagaaccgacgacctcatagcttttatcaacaaatgtaatctcccgtatttcattgtttttcgtaaaatcattcaaaatccgtttgacgtcatctttaatgacggtgctgtcattatctcctttatattcctgctcaatataataggatagattgtcaatgcgctgatttaacgataattcataggacttgagaagagaattctccacctgtttcacaaagtacacgccgataatctgcatggcgatgataatgagaagcacatagatcagcgtgatcttaaattgaatcgaccgaaaaaaaccaaccttattcatcgccggttagtcctgttcagggtttctcaagtaataaccgacaccccgtcttgtgacgatccagttcggatggctcggattatcctcgattttctcacgaagacggcgcactgttacatccaccgttctcacatcaccgaaatagtcatagccccacacagtctgcagcagatgctcacgcgtcatgacctgtccgatatgtttggctaagtaatgaagcaattcaaactcacgatgagtcagctcgatcgtttcttctctttttgatacgacataagcgtcagggaagatgacgagagaaccgatatgaatgtcattagaagctgattcttcctcagccggcgcaaccgtaagctggcggcgcaggttcgctttgacgcgggccagaagctcacgcgtgctgaaaggcttcgtgacatagtcatccgctccgatttcaagcccgatgaccttgtcaatctccgagtcttttgccgtcagcataataatcggcatatcatattttttccggacttcccggcacacttcaactccgtctttattcggaagcataatatctaaaagaattaaatcaggctgaagctcctccaccatttccacggcttcgtttccgtcgtacgcacaatgcacgtcatagccttcttttcttaaattaaactctaatatatctgcaatcggtttttcatcatcgactacaaggattttcttatccatcatcttgattttcctcctgccagaatgacttcatttcatctattgatgtttcatgatgatcacaattcggatcgtgaaaaacgttccccgtctattataacggtttcaggtcaaaagataaaaaaattaaatagaacagcgcaaaaacgtattgaactgccatccttttgtcatgttttttattttcttttaaaaaataatatttttttgaaacctcacgaaaaaaaacgccgtctagtgtttgacgtcttcttctgggccggctgaaaagccggctctccctttttttataacaaaagaaaaaacgcacctactattgcagatgcgtttgggtaagtggctcgggacggaatcgaaccgccgacacacggattttcagtccgttgctctaccaactgagctaccgagccagatgtttcttttctatactataaagtaaagtaaaatggcggtccggacgggactcgaacccgcgacctcctgcgtgacaggcaggcattctaaccaactgaactaccggaccttacagtaatttgtccggagagccgtatcgtggcggccctccgaggacaaataaggagttagcaataacgctaaagtaaatcaatgacccgtacgggattcgaacccgtgttaccgccgtgaaagggcggtgtcttaaccgcttgaccaacgggccataaaaagtggtgagccatgaaggactcgaaccttcgaccctctgattaaaagtcagatgctctaccaactgagctaatggctcctgatgtgtcggattatgtatcatagagcattcagacaaaagctttcttgcagtactctattgaagctgttccgtaacaacgagatttataatatcatagaacattcgaaagtggcaactacttttttgaaaaaaatctattatttttttcctacataaaaaaacaagcctccgtgaccggaggcttgtttgctgcaaattcttagttagcgcggtatacactgcggatgacgttcgtttgtgaacggtcgggaccgacagagaaaatagaaagcggaatacctgtcagctgagatacgcgttccagataatggcgcgcattttcaggaagatcgcttaatgtttttgcgcctgtgatatcttccgtccagccaggcatttcttcatataccggttcacactctgcgagagctttcagacttgccgggaattcttcaatcacttcacctttgtagcggtaagcgacacagattttcaatgtttcaatgccagtcagcacatcgattgagttcagagaaagatctgtgattccgctgacgcggcgggcgtggcggacaacaacgctgtcaaaccagccgacacggcgcggacggcctgtcgttgtgccgtattcgcgtccgacttcacggatttgatccccgatttcatctttcagctcagtcgggaaaggaccgtcaccgacacgggttgtgtacgctttagatacaccgacgacgtgctggatttttgtcgggcctacgcctgaaccgatcgtcacccctccggcgaccgggttggatgaagtgacaaacgggtatgtcccttggtcaatatcaagcataaccccttgagcgccttcaaataaaacgcggcggccttcatccagcgcgtcatttaagacgacggatgtatcgcatacatactttttaatctgctggccgtattcataatactcatccagaatatcttcaattttgaagccttctgtttcatacattttttcaagcagacggtttttctcttcaaggttccgttcaagcttttcagcaaacacgtcacgatctagcaggtctgcgatccggatgccgatccgcgccgctttgtccatataagcaggtccgatgccttttttcgttgtgccgatcttattggcccctttgcgttcttcctctacttcatccagtttcagatggtatggaagaatgacgtgggctctgttgctgattctcaagttatccgtgctcacattgcgttcatgaagatacgcaagctctgttatgagcgctttcggatcaacaaccattccgttcccgatgacacacgctttttctttataaaaaattcctgatgggattaaatgaagcttgtacgtgacgccatcaaacttgatggtatgtcctgcattgtttccgccttgataacgtgcgatcacttctgcattttctgataggaaatctgtaattttaccttttccttcatcgccccactgcgtacctactacgactactgaagacatatatccgtgcacctccgttaacctttcaaaacgatatctcattcaaacaaattaagtgtatcagtgccgaaacagaaagtcaatcgtaaatccgaacatttaaatcttatcaatctatatttgttcgccttaaacatgattaaaagcgttttctctttcatttgctatctattactcccgaaactttcatgctttaacaagaaaaagaacccgtaatcagggttcttcagacagtcacttatatgccgcttgtattcatcaggacgacccgccagccgtcaggatcttcgatggtcacgcctttttcttcccagtacgggttttcgggtgctttctcctcatatcccatctgctttaatgtcgtgctgatgcggatgacctcctgctgatcctggatgtaaaagacaagcaggctgtcgccgtgcggaacgggcgccggctgagacgcgccggtttcttcggtgaattctaagtgatattgcgtatggggcaggccgaacatgacgccgctgtagccctcatgtccggaaaaactgctgaccctcttcagcccgaggccctcttcataaaacctgatgatttctttgagctgtccggtcggccgggcaatccggatttgcgccgcttgaaattgaggaaattcaattgtcatcatcatccctcccttaatgccattatataaaagcgctttctttttttcgtctgccgaacggacggcattctctcattctttcggatgaaaaaaagcctcaagacattgcttgaggctttacgcacctgccggaacaccgccgtcatcaaagcgcctttccaggtttacgaacttattgtattctttcacaaaagccagtgagacggtgcccaccgggccgttacgctgtttggcaataatgatttcgatgatgtttttgttttcggattctttatcatagtaatcatcacgatacaggaaggcgacgatgtcggcatcctgctcaatacttcccgactcacggatatctgacatcatcggacgtttatcctgccgctgctcaacaccccgggagagctgagacagggcgatgaccgggacttcaagctcccgcgccagcgcttttagcgcccgtgaaatttccgatacctcttgctggcggttgtcgcttgaacggccgcttccctgaatgagctgcaagtagtcaattaaaatcatgcccaatccgttttcctgcttcagcctgcggcattttgaacggatttcgctgacgcggatgccgggggtgtcatctataaagataccgctgtttgacagacttcccatcgccatcgtcagcttgccccaatcttcttccgtcagatttcccgttctgagattttgggcattaatattcccttcagcgcagagcatacgcatgacaagctgctcggcacccatctcaagactgaatatcgcgacgctctcatccgttttggtggccacgttttgcgcaatatttaaggcgaacgccgttttccccacagacggacgggccgcgacaatgatcaaatcattccgctgaaaacccgccgtcatccggtcaagctcaataaaaccagtcggaatcccggtaatatcgcctttccggttgtgaagctgctcaatgttgtcgtatgtttgcacaagcacgtctttgatattttggaaggcgcccgaattttttcgctgcgcgacctccataatcgttttttccgcatcgcttaataaatcttcaacttcatcctcgcgcgtatacccgtcttgagcgatcgaggtcgccgttctgattaaacggcggagaatcgatttttcctcaacgattttcgcgtaatattctatattagccgctgtcggaacggaattcgcgatgtccgtcaggtaagagacgcctcccacctcttctaacaaatcggtattcgcaagctctgacgttaccgtgaccaaatcaaccggttcaccgcggtctccgagcacgagcatggcattgtaaattttttgatgtgacattctgtagaaatcatccggaatcaacacttcagaagccagtgttaacgcagacggctgtaaaaaaacagcacctaacacggcctgctcagcttctatgttttgcggcggcagccgatcattcagaaggtctgtcatgctaagcaccgtcctctccttaaaaaatatccaaactccattttaccatttctcaagaaaaagaatagaaaaacatcactttccctgtatttgtcaaacagcggctgcgtgtttcaccattccgaatgctgggaaacaaataaataaatcgaaaccaggaggtaagaaggatgaaaacatatgcagtaacacccagtattgatgcggacggatggtttgtgaaggtggaaaatgtggcgccgacggctctttatacatcaaaggacgcggcgatcgagaaagcggagcagacggctaaagagaacagcccgtctaagcttgtcatttatgatcagcataaaaacattgaagaagaacggtccttttaagaaaagccttcgcccgagcgagggcttttcttattcgatgaaacggatgtgcagcaccgtctgcgccatgagatcggccgttttttgatacagctcccattcttcacaggcggcgaatactttcatcatgtcctgcaatgtctgtttcagtatgataaattcgtcaattgtccgcagttctgcggcttttttctgataatcagccagcttcagctgtaataacatcaatggcgattgcataaaaaacctcccccattctgttataaagccccgcttttcaaacctccattcctttgtcatatcctcttacgatagatttctgattttagtacaataaagaaacggaaggagtgatcacatgaaaccgctgcaaatttccgccgaaacggcgcaaaagctcgcagaatcactgaatatgccgcttgagagaatcatgcacatgcctcagcacattctgcttgccaaattagctgaagtccaaaaagagaacgatcacaaataaaggctgctctctcatatatatgtgcgggaggcggaagcgatggctttccgcctctttttttgtgaagaaaattttggcaaaacattctttgaacggaaccgctccgattttaaccgtctcacagctgaaaaaacttgttgacgaaggaaaagtgaaatatttcttattatccggaaacaattcaggcaacacgaagcttgtctcatggatgaaaaagaacggcacaaaaatctcagctgaccaatacagcaccggaaaaacaagctcagcccggcaaggaatgacgggcggcccgggcggacaaagtcagcagactctgtatgagatgaaaaaatagctcggaaagaggctggatagttaaacaccggcctctttattttgctcttgaagcaccttccatgcggcgccggtatcattcagaaaaatgattgataaatcctttctatttttgaaaccatcagttcctgacgcagatgccggccggcataggagcgcgcttcttttccaagccgttccctgagagactgatccgtaatcagcattacgagagcatcagcaagttcgcggctgttgccgggctgacaaataagccctgtggcctcatgccggatcatctcagggattcctccgcagtcagttgcgacaatggcttgacctgagaacatcgcttcgatgatcgctatagggaaattatcattcaatgtcggcaggacaaatatagatgattcagccaaaagcgccggcacatcacgtcgttttccgaggaaaaacacatttgagaggcccagtttccgtctcttctcttccagaaaccctctcatgtttccgtctccgatgatccatatatcaactccggataaatggtgccggatgcgggcgagagcgtccagcagcacatcatgtccttttcgctcggtcagacgggaaacgcacgcaatcacgagcttttcagcacgttttgactcaggggcatcctgaatatcaatgccggtatgaacagtcgtcagctgagcctccttcgctccgtactccagcaagggctcgtgaaaggagtcgctgattgtaatgattttatccgaagcccgaataccctgcctttctatttcactgaaatatgcctcttctattgaacccttttggattttatgaaacttcatccggcttttcgtaaaatgtccgtgcggcgtgaaaaaaagaggacgctggtacgtttgattaaggtatcccagcaaaaataccgcaaataaatcctgcgcgtgaaacaggtcatattgttctaagtctttctccttcaaaaatctttgaaagacatgtaaatagctgagattcttcacaaacttttcgtttgcggcgccgtttctgccaacaagaaacgctctgatctcgtcagcggcccgcgggatatcttcctgaaaaaaagatggcggcatttgaagcggcgagatgacatccgcctgatgaccgatgcgctcaaaacccgtcttaattgatgtgatataactcgccaaccctccgacattcgggtaacggagaaaggttgcgtacagaatacgcaatggcttttttcgtttgggggagctttttccttccgcacagaacgaatacagcatctctggctcactttgatgttcgatcccgtaaaattgatccatgacgcgcaataaggctggaggcaccagaccgttcggcttgccgatctcttctttcacatccgctccccctctctcaaacttataatcctaattcccgtccccattttgacactttgtcaacatgatacggcagcagttcccctccccgattgtcgaagattctccgcaattgggtatgaagccctttctcaagtgttctctgcaaataagccattttataaagcgtcataggaggggtctgaaaatgaatgccccgctttttcatttctttcgtatacacttttacgcaatacgtccgaatatcttctgcgtgccggctccaatcttttctgaagccaagcagaatttcaaccagcaccgtcatatcaaaccaaaccggcgcgtattttgcggattcccaatcgatgaattgaatatcccacggttcatgtccggacgcatcgtgggtgcagatattctgcatatgaagatcaccgtgtgtgatggctgagccgttttgtatcaattcagggaaaaaatccggctcctcctgctcaagcaagtttgtgatttgccgataatgaggcttcacgatatcttttgtgcgctcatctttaagagccctatccaataattccgctgtctttttgatctgctttttacgcccttttctcacggtttccgattcgtataccggcagccacgaccgccatttaccgtcaaaaatattcttgttttcaaaggtgcggctgtgcaattctgcgacagtcggaataatatacttgaaatgcttcgggtgaaatgtaagctgtcccctgatctggctgacaaactccataaatatccacgtttcatggtcactttcttctataagatagatatccggcagcaaatcccctaaaacagaacgggctttcccgtatatattaatctcgaccttgtttttttcacgggaagatttatataccttcaatatcagcggaacagtgccggattttttctttacaaacagtttataaatggcgcttctgtccgtcgatttcaggcatgtgatgtcatccggattcaccgcagccctttcaccgaacgaatacgacagtttttcgtcaattctcagtttttgaaatgcgccatacaaaatctccttttcatacatgccgatcttccttccgcttccgtttccagctgtttttgagatgagaccaagtgtttctgataaatggcatcgggtcattccaagcaaaaagagcgtactctttttttcctttacaccctttccaaaaatcccggaacgtcatttctcctctttttcgtttcttcaaaaacgttaagaaataacgcacctcataaatccagttgattccgtctttttgttcgagctggggcttcacatgttgtccggtcaaatacagatagtacatgtaaacgaaatgaacgcctgccggttctgtcaggctatggctgagccaaaagcgcggattaatttcgataaacttgtaaacattgtcccggggatcctttttaaattccgccatgcctactcccttcagctgaatcgcttcaaaaaacggcagggtcttctcgattaaatcaggaagccgtttgctgacgacgtgggcccccgcgccaaaatctgcagggaattgatggttcttttgcagagagaataagcccattaatttcatttggtcatcataaaaagtggcgactttataaaaacactggttgtctccggggatgatctcctgcacgagcagttctccattttctctgtaggagctgaactccttgcgcaattgtgcggcatccttcattacaattgcttttttgtttactttttttctgtattcatggccggccaccggttttaaaatacacgggaagtcaatattggcgatggcctcttccagctcatcctgattgttcggaaaaaaggttttcgggcaggggatgttatgcttgaccgctaattcatatgctttgcttttatctaagaccgtttctaacagagagtggctcgggagcaaaaataaaaaaaaaccggctaatgtctcgcggaatttagatataaatcccgcataatcatcagatcctgcgtacagaaccggctttgcttggaatcgcttcccgaaatcagtcagaaatgtcagcagttcttcctcttgtgttaaagggctgggacatatcccgcaatctgccaatcttgattttccgatacgataaggtccctccgtgtcaaacgcgtaaacatcgattcctcttcgggccaggctgcgaatgatcccaatcccgtttgcactgaaatcaagtacaacggctgcatgttcatgtttcatgatctccctccgagctgttggtattttgataaatcgattcgatattttttatcatcgtctcactgcttaaatatttctccgcgtaggcctttgcgtttgaagcagctatcttccgcgcagatttgttagtgataaaaaacgctaaagcccgggcaagaacctttacatttcccggctcgacaataagccccgttttgttatggcgaatcagatccggaatacccccgcaatcggtcgcgatgatagccgagccgctgaacatcgcttcaataatcgaaataggcagactatcattaatggtcggcagtacgaatatgtccgtcatattcaaaatagcgggaacatcatctctttttcctaaaaaggaaaccatagatagattcaattttcgagcctgttcctctaaggcgctcctcatctctccgtcgcccgcgatcagcacttcaacatgctcaagtacatcagatggaattctcgaaagggcgtccagtaaatatttgtgaccttttctcgggcctaatcttgcaatacacgagatgatgatcttatttttcggtaccggggtttttcttttcccgcctgtttttgcatcgtaatcgattcctgtgatcaccgttgtcatgtcttcctgttcggctccgagcttcatgagcgggctgcggaacgtatcgctgataataatcaggcgatctgcgtattcaatggctttcatctctaatgttttataataaatctcttctaccgagccttttttaaagatgtgaaatttaagtctgttgaaagtaaacatgccatgcggtgtgaaaaataaaggttttttatagatttgattgaacctgcctaacatattggctgtaaataaatcttgagcgtggaacacatcatatctttccaaatgaatcttttgaagcatttgctcgtatataaacatcagccgattatttttcaaaatatgatcgttataatccccatatctgtctttaaagaaatcttttaatttcggaacaacagccgcccgcatttcttttacctgtgcggacggaaacagattaggggatatgacatccaccttatgacctctctttttcaggccttcactaagcgttttaatatagtttgataaaccgcccgtgtgcgggtagtcccaaaacgtggcaatcaaaatggataacttcttttttttcctgtataccggcggaatttgatctgcatgtttcatctgtgtctttatggctttctgtttttgcaggcgcgttttgaccccgtagtagcggtcaagcgtctggatcatatacggataggggacggaaaatgtcttgttcatttccagatcctccgcacgatttcaaaagcttcagcgtattccacacccgccgtcatccctctgacttttcctaaatgttttacgccttcatatgaacggggatgagggtaatccctcatttctacgtcatagtggtgaagcgccgcgagtttggcatccattgtgtctgtgatgttaacgaagtaattaggcttgaagagtttatcagccgtattcctctcccactcgcttgaagatagcgtttcaaacgtaagcagttcgataggcttttgattcggaagcggtctggcggctgttaaaactgcttggaatgttctctggtggtccatattgatatcgccgtaatgatgtgtaaagattttatcaggctgatagacgcgaatgagctgctctaattctttgacaagcttatgaagagggatacattccagctctaaattcgtgtgctccaaaaagatgactttctcaattccaagctcttgattcgcgcgttcgcctaattgtttaatatgatgagcttcttcttttcttcctaatgccgtaataacggaaatcactttatatccttcattgatcagccgttttatggtgcccgctgatcccaatagttcatcatcgggatgagcgccgataaccataatgtattctgccattttttccacactccaccaaacaaatgttacaaatatcatatgacgaccctaaaaaaaggaaacttacatgtgcggattttcagaaacttacatgtgcggctgccattccaggtaacgtgacggatttaatttttttatagtgttcaaaaactcatccgccaagccgtatttgtccagtccttttaatagttttacgggaaaccgggtaatggcggaaaaagctcttttatggtcgatgactttaagattgccgtattcattgatcagaatgtgcctgatttcggcatcccatctggtaaaaccgattttctttaattcatccagcatatttaaaatatcagcagtcagtttgacggacagggatttttcttgtttgatatggcgggcaagagaggtgccttggacatattccatcacaatataacgatctccgtattcatacagtcttggaatcaccggggaaccttgtccggtctttaaagctgccaattccttcttgcatgtctctttttcaaagaagtactttacgcatttgttgtgtgttaaacgatagacttccccgtcttttccgtcaccgatcagcggatagtgctccagcgcctttttattctccggatgattaaaatatgtttcagaaaaaaatcgtttcataccgacacatccttcgttatgatgtaatataatatgcaatctggtaacgatcggaaatgaaacaatctcatcattttcttgcgctgcgccgtctgctgacatgaaaaaaacccgccggatcggcgggtttttcattgtattttacgcttcttcttttacgtgaaccttcagcacagcctgaacttcagggtgcagctttacaggaacgtttgtatatcccagtgtacggataccgtcttggagctccagtttccgtttatccactttaatcttatgcgttttttgcagcgcttctgcaatctgtttgcttgtgacagatccgaatagacggccgccttcaccggatttggcactcagctcaacagtcagctgttcaagcgtttctttcaaatctttcgctctttcaagctcggcaatcgcttcttttttctctttttctttctgtcctttcaatgcgctgatgttcgtcgcatttgcttcgacagcgaggccttttttaatgagaaagttatgtgcataaccgtctgctacgtttttcatttcgcctttttttcctttaccttttacatcttgtaagaaaataaccttcatctctgaacgcctccctcaaaatattcatcaatggcttccttcagccggacgagcgcttctgagacagaaatgcccgataactgggttgccgcattggttaaatgccctccgccatccagcgcctccataataatctgcacattgacctcgcccagcgatctcgcactgatgcacaccgtatgctcatcccgtctggctaccgcaaatgaagcttccacttcactcatcgataagagggaatcagccgcctgcgcaatcagcacctggtcaaagtactcctcttcgttctcaggaagagaagcaatcgcgatatgttctttataaagagacgtatgctggatcagtttcgcccgcttgatataagaaccgacggattctttgagaactttctgcaccagaaccgtatctgcgcctttcgctctcaaataagaagcggcgtcgaacgtccgcgagcccgtgcgaagggaaaaactcttcgtatccactattataccagctaacagggccgtcgcttcaatcatattgattttgagccgcttcggctggtattcaagcagctccgtcacgagttctgcggtggatgaagcgtatggctccatataaacgagcagcgggtctttaataaattcctcgcctctgcggtggtggtcaatcacaacgatgtgctcgattttgttcacgagacgctcttccatcacaagggacggtttatgtgtatcaacgacgacaagcagcgtgtcatcatttgaaatttccatcgcctcttccggcgtgatgaaccgcgaccacagctcttcatattttttaatttcttcaatcagacgctgaacgcttgatccgatctggttcggatcaatgacgatgtagccttctttgccgttggcctgcgccaccttcaatattccgattgcggctccgactgcgtccatatcaggaaatttgtgccccatgataatgacattgctgctttctgagacaatttccttgagcgcgtgggaaatcacccgggcgcgcacccttgtgcgcttctccatcggattcgttttgccgccgtaaaatttcaccttgccgttcggcattttgatcgccacttggtcgcctccgcggccgagagccaaatcgaggctggactgcgccagatctccaagctccttcaaggaagaaaccgatgcgccgatcccgatgctgagggtcaaagatacagtgtgaacggatgttttttctcggatttcatccaaaatcgaaaatttcgcgttttcaagctccgttaaaatgtgttcatttaacaccgcgataaaccgctccgaggacgtccgtttcaggaaaatgccgtactcctgcgcccacgcatttaataatgaggtgacctggctgttcatcgtacttctcgtttggtcatccagcccctgtgtgacgtcatcatagttatctaagaagatatatgccagcacggttctctcattttcgtactgcttttcaatctgaatctgttctgtcacatcaaagaaataaagcaggcgctcatctcttttaatcactactttaaacttccgctcattcaaggtgatcgtttccgaatcgacctcctgcttgatcagcggcacgacggcctcgcatgtgtcatacagcgaccgtccgacgagcgtgctttcattaaaacaggaagacaaaaacggattcgcccactcaatgtaatattgatcattaaacagcataatcccgataggcatttccattaatgcctcttcgcctacttttttcaatctatacgataacgtggagatataatcgtcaatttcttttctgatcagagaatccgcacgcttaatgaaaaacaagatcacggcgagcagcacaacgccgatggctcctatcagccagttaaagtaaatgctgatgagaattatgatgattgacaatgcaatcaatgcatagatgggataccgaaacaacggtttttcataaaaactaggcatttctatcaactccccacctgtaagtcacactcaatttcgcgtcaccttatttcttatgttaaagcctatgtcaatgatgcctaagaggagatacacggacaagatgagcggaaaaagcacccccagcacaattgctaatacaggaacggctttcggcatctccatttcgcggcaatagaaaaaaataaacgctaatccttgaatacaaatcagcaagctgagaataaatcccccattcaatgaaaccgaatacagcatatgccctttttctaaaggcagaaaccctaatatcgtcacaataaaatacagaatgacaacgctttgcgggagtttgagctctctaaaaggcttcatcttcggaagatcaggggaaaatcgccgtaaaagcggccttgccatagcataactgaggaaagaaaaaacgatgccggtcaatacgagcactgtcggaaaaagatgttgaaccgtgctcagctgactttccatcagcttgatctgcttcccgaactggtctccataaccgagctgctttgacatggtatcagccacagacagcgactcccgaagctgggacatggtggtatcaaccacattcatattaagaaacacgatgctgaccacaaaaaaaacgacgccgcacagcacatacgccatagcgccggcagcaaccgcatagccgggctgtttctttttaaaataatatcccatggcgattcccgtacaggccgccgtaaaagcgcctgtaagcccggtaaacgaacttacaacaaagctgacaggaaggctggcaagccccatccataccccgggcttcagaccgtgccgaatggtgtaaagaatgatcggcagcggcaaagcaaagaaaagaattgcccccagtaaagggaggtacacgaccaaaagggaaatgattgcaaaaatactgatcaaaatggcgccttctattagagcccttgtatttttcacttactcacctcaaaccttgtatcattcgaacatacgaatagaaaagagcagcttagacgactgctcttttgacgccgcaatgtctctttcaagacctgaattttccataaactctccaaaatacacgtatatattttaacataagtcgaaatcgcaagtaaaatgagcgcggacagccgcaatgttccatgtgaaacatgaaaacagacaaacggacatcccagtgaaagaatgcccgttgtatcagtgatcctgatcatccatgaaaccagaagtatctctgtttttctttttggtttttcgtacatataacaagacgataacgataagtaagagagtggtcgcctgcaaaaccccgctgctgaaaaggaagaagttctttatcatgtcccacatatagtttcacctctatttcgtatttcctttacattgagtttccctttctggaaacttcaaaacatcaggaacaacatcgggaccggggcatatgctgaaagtgaaaatgaaggataaaggagattcttacaccatgactgagcggagaacattagcatggcatgaaacgttagaactgcatgagttagtggctttccaggcaaacggacttgtgaaattaaaaagaacagagcgggacgtaagcgatgccagattaaaacagctttacagattttccatccattcgctggaacaaaatctgcgtgaactgcttcctttcttccctgaagctcccgcctttcgtgaggatgaaacagaagagcgcgctgattcctccttttacagcggcggcctgctcattctggccaaaacatctgtccgcaattatgccggagccattacagagacggccacacctcaattaagacacgtcttcgtcaagcacttaaacgcggccatcaagtggcaccaaatggtctttgagtatatggaagaacgcggtcaatatccggcttacaacctgagcgaattgctgaaaaatgatgtgcgcaacgccagaaaagccatcgcgatgaaataaaaaaaagcagcaaggaatttaatcctttgctgcttcttatttttgagcggactgatcttgaggagacgttttttcccggtatgcctcgagaaactcccggttggcatctccccatttcttcatttgcaaaacgatcggttccagcgacctgccgaattcggtaagagaatactccacctttggaggcacctgctgatatacctcgcgatgcacgatgccgtccgcctcaagctcgcgaagctgaagcgtcagcatacgctgcgtaatgctggggcaaatgcgccgaaactcattaaaccgcttttttccgccgatcatatgataaaacaaaatacccttccactttcctccgataacggaaagcgtcagttcaaccggacaaccttctttattcggatatatgttcatttttcatcctccatagtaccttttttgatactatatgctgattagcatctgacttacccagtattttactcgcaatcctctccacctctcaacaaaaatgcttctttttcacatcaatttttaaggttttgaagattacaccctcctcaagacgtgttaaactataaaaagattgtttacactacaaaaaaggacaaggagttattatggaaaaaattcttattttcggacatcaaaacccagacacagataccatttgctctgccattgcctacgctgatctaaaaaataaactcggcttcaatgctgagcccgtccgcctcggacaagtcaacggcgaaacacaatacgcgcttgattatttcaagcaggaaagcccgcgtttggtggaaacagccgcaaacgaagtaaacggcgtcatccttgttgaccacaatgaacgccagcaaagcatcaaggatatcgaagacgttcaggttcttgaagttatcgaccaccaccgtatcgccaacttcgaaacagcggaacctctttactaccgtgctgagccggtcggctgtacggctacgatcttaaacaaaatgtacaaagaaaataacgtgaaaatcgagaaagaaattgcgggcctcatgctgtcagcaatcatttccgactctctgttatttaaatctccgacttgcacggagcaagatatcgcagcggcaaaagagctcgctgaaattgccggcgtagatgcggaagagtacggcttaaacatgctgaaagcgggcgccgacttaagcaaaaaaactgtggaagaactgatttctcttgatgcgaaagagttcacgctcggcagcaaaaaagtcgaaatcgcccaagtcaacacagttgatattgaagatgttaaaaagcggcagccggaattagaagcggctctttcaaaagtaattgctgagaagaaccttgacctgttccttctcgtgattacggatattctggaaaacgattcccttgcgcttgccatcggtgatcaagcgtcaaaagtggaaaaagcattcaacgtgactttagaaaacaacacggctcttttaaaaggcgtcgtatccagaaagaaacaagtcgttcctgttttaacagacgcgattgcagaataatcaacacaccccggaaaccagccggggtgtttttttattgctcaatcatcagacggcgtttcgtaagcgctttctccgaaaattattttgacggaatttaatataaaatatacaatatataatatatcacatggaagacgttcgatttcctaattattgtaagttagcatcacaacatcagaatcgggggtgtctatcctggaaaaacacgctgctctttcttattcacgaacaacaggcatttggcttgtgctgacaggagctatcttatggggggtctcgggaacggttgcccagtatctgttccagcaccgccattttaatacagaatggctgacttcggtgcgccttctggtgtcaggggcgcttctgctcggcatcgcgtaccgcaaagaaaaaggacggatatgggctgtttggaaagacagacgggacagaattccccttcttttattcgggattttcggaatgttaggcgttcaatacacctacttcgcggcaattgagtacggcaacgcggcaactgctaccgttcttcagtatttagggccagcgatcattacatgctttttagcgattcgcgcaaagagaattccttcagcaaaagagctgctcgccgtcttattggcggttgccggcacattcattttggtcacgcacgggaatgtcggaagcctgtccatatccggtctggccgtcttttggggcatcagttcggcgtttgcactggcgttttacacccttcagccgcatcgtctgctgaagaaatggggatcggccattattgtcggatggggcatgctgatcggcggagccgccctcagcttgatccgcccgccctggaaatttgaaggcgagtggtcctttcctgcatatgccgcgatcgtgtttatcatcattttcggaacgctcatcgctttttattgctacttggaaagcctgaaatatctgagtgcctctgaaaccagcctgctcgcctgtgcagagccgctgtcggcagcttttttagctgtgatctggctgcatgttcccttcggaatatcagaatggctgggtactttgctgattttagctaccatcgctttattatctatcaagaaaaaaaaacctctcttttttagagaggttttttcctaggcccagagcaccccttagtctcaattacccatatattaaaaggccttttttcattttactatcatccaaaagaggaaaatagaccagttgtcaatagaatcagagtctaatagaatgatgtcgacaagtaaatcatgcaggattgttactgataaagcaggcaagacctaaaatgtgttaagggcaaagtgtattctttggcgtcaccccatacatattttaggtctttttttctgtaacaaacctgccatccatgaatgcaggaggatcgaatcggcagatcgcaaaaaaggtacatacaaaaggagacatgaacatgaacatcaaaaaatttgcaaaacgagccacagttctaacttttacgactgcacttctggcagggggagcgactcaagccttcgcgaaagaaaatacccaaaaaccttacaaagaaacgtacggcgtctctcacatcacacgccatgatatgctgcagatccctaaacagcagcaaagtgaaaaataccaagtgcctcaattcgaccaatcaacaattaaaaatatcgagtccgcaaaaggactggatgtgtgggacagctggccgctccaaaacgctgacggaacagtagctgaatacaacggctatcacgtcgtgtttgctcttgccggaagcccgaaagacgctgatgacacatccatctacatgttttatcaaaaagtcggcgacaactcgatcgacagctggaaaaacgcgggccgtgtctttaaagacagcgataagttcgacgccaacgatgaaatcctgaaagaacagacacaagaatggtccggttctgcaacctttacatctgacgggaaaatccgtttattctacactgacttttccggtacacattacggcaaacaaagcctgacaacggcgcaggtaaatgtgtcaaaatctgatgacacgctcaagatcaacggagtggaagatcataaaacgatttttgacggtgacggaaaaacatatcaaaacgttcagcagtttatcgatgaagggaactatacatccggcgacaaccatacgctgagagaccctcactacgttgaagacaaaggccataaataccttgtattcgaagccaacactggaacagataacggataccaaggcgaagaatctttatttaacaaagcgtactacggcggcagcacaaacttcttccgtaaagaaagtcagaagcttcagcaaagtgctaaaaaacgcgatgctgaattagcgaacggcgccctcggtatggtagagttaaacgatgactacacattgaaaaaagtcatgaagccgctgatcacttcaaacacggtaactgatgaaatcgagcgcgcgaatgttttcaaaatgaacggcaaatggtacctgttcactgattcacgcggttcaaaaatgacgatcgacggtattaactccaacgatatctacatgcttggttatgtatcaaactctttaacaggtccttacaagccgctgaacaaaactggtcttgtactgcaaatgggtcttgatcctaacgatgtaacgttcacttactctcacttcgcagtgccgcaagccaaaggcaacaatgtcgtgatcacaagctacatgacaaacagaggcttctttgaggataaaaaggcaacatttgcgccaagcttcttaatgaacatcaaaggcaagaaaacatccgttgttaaaaacagcatccttgaacaaggacagcttacggttaacaactaataacaacaaaaagaaaatgccgatacttcattggcattttcttttatttctcaacaagatggtgaactcaatcatggcacgaaaatggcccgttgtaatattgatctttttgggtgcgttcctgtttgtcggcttactgccgaacaaaagccacaattcctctgacacaaacacggagcataagaaggattaccgggcggcgtatcattttacgaccccggacaaatggaaaaacgaccctcaaaagcccatttttttcgaggggaaatatcattactactatctttataatcgggattacccgaacggcaacggcacagaatggcggcacgccgtatcagaggacttggtgcactggacggacgaaggcacggctattccgaaatacaccaacgaaaacggcgatatatggtccggttctgtcgtcattgataaacacaacaccgcgggcttcggcaaaaacgcgctggtcgccgtcacaacgcagccgacagccaaaacaaaagcccaggaacaatatttatggtacagcacggacaaaggaaaaacgtttacttcctatagtgatcagcccgtgatgaaaaatccgggaactaaggatttccgggacccgaaagtgatctgggatgaacaggatgacaaatgggtgatggccatggccgaaggcgaaaaaatcggtttttatgaatcacccgatttaaaaaattggaaatacacgggcggttttatcactcagcagatcggcctcgtcgaatgccccgacctttatatgatgcgtgcagatgacggaacagccaagtgggttctgggcgcaagcgcaaacggcaaacccgcaggcaaaccgaatacgtacgcgtattggaccggaaactttgacgggaaggaatttaccgccgatcaagaagaaccgcaatggctcgattacggctttgactggtacggcggcgtcacatttgaggacggtaatagcgaagatcctctgacaaaacgctatgcgctggcatggatgaacaactgggattatccgaatgaaacaccgacactaaaaaacggctttaacggcacggattctatcgtccgtgaaatccgccttcagcagcaggaaggcggcacatacagcctagtgtcagagccggttgaagcattgaaccaattaacctcttcaactgacagcatagaacacaaacaggtgaacggttcagagacactgccgatcacaggtgatacatatcagcttgatatggatatcgcttggtcagatatcaaaaatgcaggcgtcagactcagagaatcagcagaccaaagtcggcatattgatgtcggtatttcggcagaagacggctatgcctatgtgaacagatcgtttacagaccagcctgataaaaccggtgcatacgccgaaagcaaagccccatttgacggaaacaaagggcgcgtccatctgaaaattctcgtagacaaaacaagtattgaagtatttgcagacgacggaaaaaccgttttgacaaatgaagtgttcccaaaacacgaagatcagggaatcacgctcttttctgaaggcggctccgctgactttcagcatattgagatgaagcatctcggttcgattcattcttagacgtccctcttcatttctaaccagcgcccggactgtggtaaaatgcaaatatgtatactacgattcatgaggtgttccattggataatcaaaacaaagaacctgtgctgaaaagaaccatcatgcgggacgaagtgtatcgcacactcagaaactggatcataacgggcaagctcaaaccggaaacaaagttaaaggacaaggatttgtcggaaacattgggaatcagccgcaccccgatacgggaagccttattgcggctggaagatgacggcttggtgataacaaaagcgaacagatggacgcttgtcgctccgattgagttaaaagaagcggaaaacttgtattccatcgtctggacgcttgaaaaactcgcattgcagcaagctctcccgcatgtggacgatgccgtgattcaggaattgaaacagctgaatgaaaatcttcttcaaacaatgaaagacggcgataaactggccatcctggaagcggacaatgcatttcaccatcgcatcattctgcttgcggacaacgccgaacttcacaaattgcttgtaagcctgaaagtcaaaattcagagaatggaaatccgctatttcagtgaaaacggcgctttaaacagatcatataatgaacactctgatatcattcacgcattagaacagcaagatgccgccgctgcttttacagcgcttgaagcgaattggaaaaacagtttagaacggctgcagaacatggcatagcaaacgaaacagccaaatcactcatatgatttggctgttttacggatatcacaagacagccgcgttggctgtcttgtttactttttgtttatatataaatacataccgtaatccgtcggcacagaagcataccccatctgtctgagcatggctgttatattcccgcgatgatacgttccgtggttcacaacatggaggatcatatcggccgctgcggttttcatgatgtctcctgacggatgctctatttcaagggggagactgatattttcttccttttgcaaaaataattgatatcgatctgataattccaaaaacatatcttccagctcttctatctctttagacaagatgtcctctttttgctgttcagctgatttcagcgtatcctccagacgctctccggagaacacatcaaaccaccccttatccgacagatacacatgagtcaatacaccggctatcgacggaaagacactttgaatctccttacggtacacatcctccggaagctctttaagccgggtgaatatttgctgatttgcccaaagatgataatcatacaattgcagtgccagatgtcccacattaccctctcctctctcgatatagaacgtacgttcctcattatactacactacatgcggctttgtaccatcttcttcattcgcagctgagaaaatccgataaaagccgaaattaataagaggaggcctgcgccaatataaataaaccgcacgccgaatacatccgagatgacccccgttccgataatggaaaacataaaaataaactgaactaaagctgatctcgccgctaatatattgacccgtgtcttctcggtcgtgatgttttgaagcaatgtttcctgcgcgagatctcgtaatacacaagccggccccatacacagcaccagaaaaagggccgtaacggcacttgtgatcaacccataaataaacgtgaacattccatatgccaaggctcccgtcagcataagcggaatgagatgatgctgaaactgaccggataacttatagatgatcagtccgccgatcatcgtccctgcataatagactccgttgacatacccccaccaagcctctcctttatgaaggacgtcatgcacataagtcaaggacacagacccgatccatatcatgcctgcccacgattcgatcacatccatcacaatgagaaccctcagctgcttttgccgaaataaatacacccagccgcttgccgcatctgcaaaaagggaacgttccctgactgctgccggcgcacacatgcgtacttgaagaaacagaatgatgcccaaaaccgaagaaaccaataacatgacagtgacgatcattgtatcgctctctcccaagaacgctatgatgacgccgccgagagaccaccccgcaaactgaacggtctgatccgccgcagataataaaccgttcgctttcgcccttcgatcaggaggaatgatttccccaatcagcgcgctttttatcggagcaaaccatccgttgcaaaaagaaatgcctccgatcagacaaaacatcagaaaaaagaatgcggatgaaccggtttggatgacaaaaaacaaacagactaacagtgtgatctgaatcaattgagaaccgattaacaaagaccgaagcgtgaaccggccggtgaccagcggcaaaacggcgctgcccaatacgcgacatacaatgctgacgaacgtcataagagaggccatcgccgtcgaaccggtttttgtaaacaaaaacaagatgacagccatcgtataaagtgagaaccccaagttgatagcggtctggctgtataaaatagcgtaatatgccctcttcatattcatcttctcactccctgattatgtaaatcataccatatttgctgatcagctctctttttttaaaaaaggtaggtatggagtcaaagctggctgacatcgaaaatgtcattaagattccggacaaaaacaaaagccgatgcgcgcaggcatcggctttcaaattaacctaaacattatttatcaccaaacgactcaagaacaagcgacacaaaagcttcagcggccggaagctgccattttttctttttgaccagcatatgagaataaagccgctcgaacggctcagactgctgaagaattttcagcttccccgcttttacctcttcttttaccgtaatataaggtaaaacggagaaaccgagtccgctcatcaccgtctgcttaatggcctctatactccaaagttccattgtttgtaaatgactgatatcatgtttgacgagaaatcgttcaaacatagtccgatagctgcatccttcttcatttgtaataaaaaagtgcttgccgctttgttgatagtcgtcaaaatgttccggggcgtcattgcccgccacgaggacgatgcgttcctccaataaagaatgatgtatgcatttttccatttgtatctccggatacaccataaatgcaatatccacgcggccgcttactaattccacctgattctgcccgcatgttccgttgctcaatatgatattgacgttcggatacttcatggaatattctctgataatcggccccagtctggaaatggtcaaagactccggcgccgcaatttttaaaacgcccttcacctcgtgaatgctttgcatatttttgatcttgtcatgggcggaaagtaaatcctcggctaacggtatcagctctctccctaaaggcgtcagtttcagacgccttttttcgtacgtaaataatgcgccgccgatctcctgttcaagcgcctgaatatgagtcgtaatcgtcgactgcgtgtatcccagcttcgccgcggcccctgtatagcttcccttatctacaatggcctgaaatgtaataagatgtctgatctccatatgaattcacctctaagatgtatcgaaaaaatcaataatgcgattttatttttcaattttatttataactattcttatcatacaataaaaaacggttccatcacattagcaaatgaaggtgatttaatgagtatcatagcttttctttcttatgtcctgatgacatctattacgcccgggccgagcaatattttaatgatgaatgaagcgcgcagagccggctttatcggttcatggcgttttaacggcggaatcctgacgggatttgcagtgctcggcattctcagcggtctgttcacaatgagtgtttatcattggattcccgtcgtggaaccttactttaaaattgccggagccgtctatttgctctatttggcttggcagatttcgctgcccaaaacatcaaaaggcgattctgaaaaaacccgatcgtcttttctatcgggatttctgtttcaaatgatcaatataaagagtattttattctttttaaccttaatgagcgcttttatattgccatttcagcacacgtatccattgattgcgttctggctcgcgtcggctattctcctgggctgggcggctttactgctgtggtcggcattcggctctgtttttaaacatctctttgagaaacacgataaagcgtttcgcatcttgatgtgtctgctgctcatctattctgctgtaagcatttatctgtaattcaaaaaagataaacgcctattggtgtttatctttttttcgtttcgtcaataatcccagccagactgaaacggctgctgaaacggcagaaagcgccgtaatcatgacggcaatgccgccccagccgaattggtgatagaaagcgccgcttgcagtccccccaatgctccctcccacataataggaaaacaaatataaggccgcggcctgtgccttatcgcggacggccagttcgccaacccagctgctggagatcgaatggcccgcaaaaaagccgaatgtgaaaatcgcaactcctaaaatcatgatccctatatcagcagataaagtaatgcagacaccaatcatgacaatcaccaatgagaatggcaggatttttcttttgccgtatttgtctgctaacatgcccatccacgttgaactgaacgttccgacaaggtatacgagaaaaataaatccgactgccgtttggcttagtgaataaggcggcttcatcaattgaaaaccgatatagttatataaagatacaaagccggcttccaataaaaaaccgatgatcaaaaggcagccgaaaccgggcgtcctgtattgacggtaaaatgaggtgaaaatgtcgtttcttttatatgtccggggcgtaaaatgagaagaggcaggaaggatcgtccagaagataatacttgccagcaaactgatgaggccgatcgtcagcaaagccgtatgccagctgaaggaatccgtcagaaagccgctgatgatgcgtcccgtcatgccgccaatcgaatttccgctgatataaagccccattgccattcccaagctgtccggctcaatttcttcagctaaataagccattgccgccgcgggaagccccgctaatgcggctccctgcagcgccctgcaaacgacgagcagctgaaagtccgaaacaaaccctgtgagaacggctaggacggatgcagcaaataatgacacgcccattatctgcttccgcccgtacatttctgataaaaaaccggcgaataccagactgatggctaaagcaatcgttgccgctgattggcttaagcttgaaaccgccggtgacaggtgaaaatcgtttgcgatatcaggcagcagcggctgcgttccccaaaggatggcaaacgtgcaaaatccgccagcaaacaaagcgaagtttacctttttgaattgaagtgtgccgcggcgaatgtaagtcatttatcttcccccttttctgttaagccgggtttgaataaacgctataaaattctccgctgccggcgataaatagccgtctttcctccaagccaaaccaatctctctttcacagatcggattggtgacactgagaagtttgacctttgttttatcaaaaacgtgcaagtcagggataagagacacccccagtttagcgccgactaacccggaagctgtcacaatatcttctccctcaaatacgacatccggtgaaaatcccgctttttcacacaactctttaatcatgccgtgaagaacatttgtatctttaaaagagataaacggttcatgctccgccattttcaaatcaatttcatcatatgaggcgagcgggtgttcagcagaaacggctaaatataactcttctgttaaaagcggctggcagatcacctcatcgttttcatcacgaagcgaagtcaatgcgatgtccacttctcttgacgttaattgctcgataatctgctgatttgatgcttgggtcaactgaaaattgacatgaggatacatgtgttgaaacgagctgatcacatccggaaccatactcatgccaagcgacggcaaaaaagacaacaatattgtgccgttgttgggatggatttcattccacacttcctgcttaccgatttcaatttgtctgatagattgttccacacgatgcaaaaacattttcccgtaccgattcaaataaatattcctgcctttgcgatcaaaaagctgaacgcccagctcgtcttcaagctttgaaatcgaacggctgagagcgggctgagatatggacagctgttttgctgcctgtgtaatatgctgcacttgcgccactgtctgaaaataattaatctgatgccaatccattgattgcctccgcgatttgttattttcacttatcatacgttacccgatctataacttctaattgttagtttgcatgaaactgatgcatataaggaatgattttcaaaacagaataaaaaaagagggcttcctttccggaagccctcattccgtctgctacgccaataaaagaaaaataagcgctaaaacagccggaagtccttgttttacgataattgatttgtttgaagtaaagcctccgaaaatggccgcgatgaccacgcagatgacgaaaaacatttgaatcatatggccaatcggatcagctccgaggatcagcccccaaatgaggccggcagccagaaatccattatacagaccctgatttgcaaacatgaccgctacattccgatcaccttctaaatgcttcggcaatttgaaggaccgcttagctgccttcgaattgataaaaaacatttcaagtatcatgataaatatatgttctaaagctacaattccgacgaaaacagccgcaatcatgtccactgtccctctcctctcagcttcacttcaaccttatttccattgtgcgattgtttcgataggaagacggtaggaagcatatccttcgtctgccgcttttccgattgataacagcatgaccggtacataacgctctttatccattccgaaaacctcggcaatcttttctttatcgtagccgccgatcgggtttgtgtcatagccgtgcgcgcgtgccgtaagcatcagctgcatggaaacgagtcctccgtcaatcagaatcgtttcacggttcacttgctccggcagtttttcaaaatgcgccgtcaacgcagcgatttgtctgtcttttacttcctgcggcatgtagcccagttcgaccgcttttgaataaatttcttctaaatagtcatcactgttcatatctgcgaaaaccgcgatcaccgcagatgatgtgctgacttgtgtttggttaaagctggcaagcggcgcgagtttttcttttccttcagggctgtcaatgacgagaaaacgccacggctgcgcgttgactgaagacggcgctgtcgttgcttcttccaggatttgagtcatttcttctttgctgattttaacagccggatcataattccgaatggaacggcgccctttcataatgtccataaagtcgtttgttttcagttctgttttcatgtgtaaaacactcctatgctttcatattttctatattattctgcatctgtgacaatacgttttttaacatactgcgttcttcctcgctgacaccggcaagcatttcctttatgaaacgctccttctcctttttggaagcctcgattctctcccgcccctgttcagtaagccggacaagtataattcggttgtcctcgggcttccgccttcttgtgaccatttctttggcttcaagctgtttcaagtgtcttgtcacggctgcgccatcaatattcacctttttctgaagatcgctttggctgatctcatcgacgtaaaaaagcacggcgagaagctcaaggcgggattggctgattccggtgcacgcttcaaacttcgtgccgatcactttatgcagtgattggagctgatataaaatctcgccttcctctgaacaacatgctgtcaaaacccatccccactttcttttgcgcaattaattgactagtcaatgtttgatatatcaataatatacagccgtcattctatttttgcaagttttttctcctttattaaaaaaagctgccgattaacggcagctcgcttcttaatgattatggacttttctgaaattactgccttttacttctgcgacatcatataccgtcacaaaggcttgtttatcaatgtcattaataatttctttcagtttggtttcttccaaacggttgatgacacatgtgatttcttggaatttttcatgagaaaaaccgccgtatgcttctttataagtagcgctccggcccaattcttcacgaatggtctctaccattaatgcaggctcattggtgataatctgaaatgttttagaaccgcttaagccttcctcaaccacatgaatcaccttagaagcaatgtagtaagcaatgacggaaagcaatgcgccttgcagcccaaatacaaaagaaacaaaaataaacacaaacatgtttaaaaataaaatgaggtcgctcgtgccaaacggcaatttccgtgacagaagcacagccagcatatcaattccatctaatgcgccgccgttacgcaatgccaatcccattccaaagccgagaataatcccgccgacaacggtgattaacagggtgtctccctcgatgatagccggtgtgtggtggaaaaaactcgtgcccgcggcaagtgagacaataccgataattgatagaaacgcaaaacctttcccgatttgcttatatcctaaccagacaaacggtatattgatcaccgcaattaagatcccaagaggcaaatgaaacagctgtgaaccgacaatgctgagtccggttacaccgccgtcagatacactattcggaatcaatacggtttccagtccatacgcggcaataattccgccgatgatgaccatgatggcccgtacgattgatttcactctgaatttcttacgtctttgtttttcgattgtactcatatcattccccgcttcaattattttttcttatttaaatataccataattgatacttttcgttaaaaataagcctatcggctatgttgaagcaggaaccgaggaaggagatgtcacagataacgtatccatttatgactttaatcattcacaatgtaatcattcacaatgtaatcattcacaatgtaatcattcactaaaaggaattaatgaccattaataatctcttttattccccttcttcacatattcccaatcatgttctatattttttctcacccgctgaagaaggctgaaaatggtttctttttcctcagatgtaaagccggacagagctacctccgcagaatgctctccttctctttgcaataacggataaacctttctccctttttcagtcggaaacagtttttttatttttttattttgatcatcaggacgcttttcaataamcccctgtatttccagttttttgattgccctcgccgctgttgttcggtcgactttaatcatttccgccactttttcctgtatcactcccgggttttcacatatacgcacaagatagagatactgcccttttgttaagtctaattccttaaattcaatattgctgatggaatccagtgcccgtgcgatcatgccgatttcccgcaaaatatcagtcatatcttttcaaacccttcattttttgttgcatttacaatataattattttatcgttacttctataagaccacaagcaagccgtgcagtccagactaacatgtgaaaaggattggttgattatgaggataaaaagaataacaacggaaattgatttacaagcagcgcttgagattagaaaagcagtattcattgaggaacagcaagtacctgaaaccgatgaatttgatcagttcgatacgcttgaggatcagtgcgggcatgtcttggtttatcatgaaaatcagcctgccggcacaggacgcgtccgcatcgtaaaccatacaggcaagctcgaacgaatctgcatcctgaagccttaccgtaaatacgggttgggcaaagtcatcataagcgaattagaaaacatggtaaaagaaaaaggcatcacccaatgtaaactgcatggacaaacacatgcggaaggcttttatcacaaactgggctatcagacagattcaccggaatttatggaagacggcatcccgcatgtcttgatgacaaaagagctgtgagctgtcactgaatgagcagccaaacggctgtatgaattatttaccgaaagccttgtataaaggctttttttcttagcctgaaactcaaattaaaaggtatgtgtgcgcagccggtgcttgtcacaaatggccgccacaaaaaaatcaaagctggaataaaactaccaattttagcttttaatctattaaaaattaacagttaaagagattataaaaaggaagaaaaccccaaattatacaagaaagactgattctctctaatatggactgctgacgcgttacattttttctatcttcacatatctttaatactaagtacgttataaatagattccaggaggagatatgaagtggaagaaacgagtatggagccatcacggctctgcaaagaatttgctagaattctcaattcaacgcccagtgtcgtaaatggcgtatgtacggcgacaagatttcgaagcaacatccatccggtggtactcggaagaagagccgaggcatttccttttattcctcaggccttttcatttgaaagcatggatcgggaaggcagagctttatgtttaggtgagactgttttactgcaagaagaagtgaacccgttaatgagtgagctgcgcaaattcggtatcatcgtaactgccgttcataaccattggctgtttgataaaccgcgtctgatgtttatgcatttcgaatcaattgataaacctctcaattttgcaagaaaagtgagagaggccctgagggttctaactactaaaactgtgcgtgcggtaccaaaaactgacggggaaatgattgaacggcatggtctttgtgacgaattcaacgatattctaggcggaaccatgcatacgtttgaaaatggaatttgtacagtaatgagatcacgaacgaatataaaaccagtagtactgggacggcctggaagatcatttttgctcattccgcaaatgttttcatttgaatcaatgacaaaagacggccgtgctctctgcagcggagaaactgtcattctgcaaaaagaaatcaatccatttatcagcgttcttcggaaacatgatctgattgtaacgtcacttcacaatcactggctgtttgataaaccgagactgatgtatattcatttcgaagcgattgataaacctgtcaacttcgccttaaaagtgagagatgctttaaatgtgcttactgataaagaggtcaaagcttagcatgtttcgaagtatcaaaaagcgattaatataatcgcttttacatatgatcaaccgaaaaacaaaaaggaggtcagacattttaatgttaaaaaacagccttataggctgtcgttttgtgtatattctattgatgagtttatactaattcaacccgcattccatacaagctctttatttctcaatggttttctacatgtcgttgtgcaaacaccttcttagccactgaaagagcattaagtacacgcgggaagcctgtataaggaaccaattgggtgatactctctacaatctcagtcggtgttaatccggatgtaagccctgtattgatatgaagttcaagctgcggctcggttccttgcgttacaagggatgaaatggtaacaagcgcacgttgttgattggttaatcccggtcgtgaatatatatctccataagcaaattctatcatgtacttacttacatctggggcgatatctttcaagtcttcagaaatttttaaatgcgtagagattttatcatcgcttgttaaagtgtactccattaatttgtctaaaccttgttggtaacggctttgatccatttgaatttcctcctgaaaagtacttattttctgacataagataatatatcgcagccctctctaaccgtaaaatacataaaaactataaaaaccattcatttttttcatgagttatcttgatttacgtaattactcttacaaaaaaatgaaatataccggataaattcgcgtactgcgtgcgaaacgtattttcctttttttgaaataatcgccactttccaaggaattgatggattaacaatggagattgccttaactaaactttgatcagtctttttcactatagactgagggaaaatggagatacctagttcttctccaatcatttcgctgataaaatcccattgagaactttcataaacgatatttggacgaaaaccggctctaatacactcttgaataatccgatcgtgaagagaaaagtcttcactaaacaggatgaaaggttcatttttcaagtcttgcatttccacaatctctttatgaacaagcgggtgagcggaatgaacgaagagcatcagttcttcattaagcaatggaatgatatcaaactgctcttcgtccactggctcaataaccacgccaagatccagtaccccatcttcaacctcctgtttcaccttgtttcccccatgttctatcagcttgatgttcacatcaggatacaattgtttaaatcctctaatgattttaggaaaaaacaaaacaccgataagcggcggtattccaattttcacttttcctttttttaaatgtaaaagatcgtataagttcgtcgacaagtcatctattgacttcataatcatttggccttgctcaaatacaatttcgcctgcatctgtcaaagcgatctgtctagctgatcgatcaatgagctcaacctttaattcctcttccaaacttttcaccatcttacttaaggcaggctgtgacaaatgcagattttctgatgccttagtaaaactgttggatttagcaacttcaagaaagtaagtgatttggcgtatatccatcgtatgacctccattccataagtttaacgaatacattatattctttttattcattttacttatacaactgctgggtgtaaacttttaggagaccaaaatgaatcctggaggggttactatgagtaaattattggaaagtaaagttgctcttgttacaggcgcggcgagtggaattggtttagaaattgcacgtgaattcgctaaagaaggcgcaaaagttgtgatttccgatttgaacgaaaaagccgtgcaacatgcagctgaggaacttacggaacaaggatacgaagtcctctctgcggtttgtgatgtaacaaacgaagaacaagtagaaaaaagtgtctctaagacacttgaaacctttggacgattggatattctggtaaacaatgcggggattcagcatgtgtcggatatagaaaacttcccgactgataagtttgaatttatgctgaaattaatgcttactgctccttttagtgcgacaaaaagagtattccctttgatgaaaaaacaaaaatttggccgcatcatcaatatggcttccataaatggtttaatcggttttgcagggaaagcggcttattgcagcgccaaacacggtttgatcggtttaactaaagtatcagcattggaaggagcggaatacggaattaccgtcaacgccttgtgtccgggatatatcgacactccattggtgcaaaaccagttaaaagatattgcagagactagaggcatttctaaagaaaaggtgtttgaagaagtcatttaccccttggttcctcaaaaacgtttattagccgtgcaagaaatcgctgattacgcagtattcctcgccagtgacaaagcgaaaggagttacaggacaggcagtcgtaatggacggcggttatacggcccaataatctgaaaaagcgctattcttcatctgtagatataagaatttctgtgaatgatttactcttcataaaccaagccgatgttcttctaggaaagacatagccatacagattgaagtttgaataaaacaaggagggcaaagattaacctttttttaacattttgcatcttaacttaagaaaagccgctttgttagcggctttttactggtttccatgagggggaagaagcatttgaaaaagcgaaacgcgaaaacaagccgattcttgtcattgatagcttgtctctttctattaaagtaatcattatatatttatctgcttgccaattccttaatcatcaaacccaattcataaattcccttttgaaggtcttcaagagatgcataagcatatgataagcgaatataattccctttttcttgagcatagatactgccgagattgagaagtatcccttttgtcaaagcttttgtataaagtaatttcatagatagtgaaggcaatatttttacccagacaaagaatcctcccttcggcatattccatatagcgacattcttcaaattggtttctaagagactcatgaccaattgccttctcacctttaattgacttctcacctgttctagatgttgctggtattcaccggatgtaaaccactctgccgctactctctgagataacgaactggagccgtaatctgtttgcatttttatgtcggataaacgttcaatcactggttctggaccgacgatccatccaatcctcaaacccggacttaacgttttcgataaactgcctatgtaaagcacatgcccatttttatctattgttttaataggatctggaggaatctcatctatccataactcacgataaatgtcatcttcaataatgggaagctgtgcattctcacttgcggcaaggatttcttctcgtctcttttttgacattaaaatacctgtcggattatgaaaacaaggatttgtatataagatagccctcccccgctccccccttgccacgtggatatgttccggcaaaagcccatcgttatccataggaactccagtcagcttcataccggctgattgaaatacgtgtaatgaataaagataggacggctggtcaagataaacggtcgatcccctttgtaaaagccccattgatataagctgcaaggcttgcagtgcgcccgaaacaataagaatggaagaaggagacgcttgaatgccgattgttcttaaatagccgcttaatgcctctctcaaaggcaaatatccttttggttcctcatacccgaatgcctctatgttttgagatacctttcccatgatctctttcataacagctaaaggaaaaatctcatgtgaaagttctcctttactgagctgtataagatcagaatttgattctgatttattgatctcttgaacgattttttggctgggctgctggattccggaggttacatactgatcccaatcgggagcggaattcttagccaaaagtgtccatgtattgttcgtaacaactgtccctttgcccattctgccttcgattaatccatccgccgtcaattcctctaaagctgtaatgactgtgctcctgttcacctcaaagtgtttagcaagcgtgcgctggcttggaatcttacttccaatcggccattctccatttcctattttctcttttataaattgaatgatttgtatgtacttaggaagctttttcatctttttttcttctggagctctcataaaaaggatcctccttaaaaactaaagtggttgggtcaaaatctatttaactggttgaagccatatcatcaaatctttattaatatagaaccacattaaataactggttggtttttgtaaagaggagtgagaaagatgagaaagaaaacagttcgaatcggtatatcttacagtctgatgattgggttgtgggcatcagctttcccgggaattcgagcgggtttggagagttacacgccggaacacctcgctttgtttcgcttgttgattgggtcaatggcactgttggtttttgctgttttgactcatatgcgtttacctgacatgaaggatatccctgctattttatcgttaggatttttaggttttgcactatatcacattttgctgaatatcggagaaaaaacagtcagcgcaggggtagcaagcttactcgtgaccatgacacctattttttctgcaatgttatcccgtctgttttttggtgaacattttgggctttataaatggattggctctatcataagtttattgggtgtgtcgatcatttcatttggggcaggaaactatacaaattcagtgaacggcattttgttaatcctgctggcagctttttcggagagtatttatttcgtttttcaagctcgctatataaaaaaatatggatttattccattcgttacattcactatttggggcgggacagtacctatgcttgtgtttctgcctggcttaggggaagagtttttgaacgcttcaatgaactcaacattgtctatcgtttacttaggtttattaccaacggttgtgccttactttgcacttgcgtatgtaacttcactcgtcggtgcttcagaagcaaccatttcactttatttaacaccagccgtagccttggccatttcttgggtgtggttaggggaggtgcctgcgtttattgcactgacaggcgggatggttacagtcgccggagtgtgtttcacctatctaacagtaaataaaacgataaagattttaaatccttatttcttatctaaaaagcaataaggtggatgaagtttaatcctgaaaatagagtcataagcagttctcctttttaatgacttgggtgtggttcacaaagttgagtgtatgaatttttttagaggattgtggtatgttaaacatacaaatattaatagaaagaaggtgagcccatgccaaacaatagtaaacccaacagtttaatcatggagaagtccccctatctgctccaacacgcccacaaccccgtaaactggcatccttggggaaaagaagccttcgaaaaagcaaaacgcgaaaacaagccggttcttgtcagcatcggctattcgacgtgtcactggtgccatgtaatggcccacgagtcctttgaggacgaagagatcgccggtatgttaaacgataaattcatagccatcaaggttgatcgtgaggagcggcctgatgtggattccgtgtatatgagaatctgccagctgatgacggggcagggcgggtggccgctgaacgtgttcgtcacaccagatcagaagccgttttatgcggggacatattttccgaagacgagcaaatttaaccgtccgggctttatcgatgtgcttgaacatctgtccgaaacgtttgcgaatgaccggcagcatgtcgaggatatcgccgaaaacgccgccgctcatcttgaagtcaaggttcacccggccgagggcatgcttggcgaacaggcggttcatgacacgtatcgccagctggccggcgggtttgatacggtgtacggcgggttcggccaggctccgaaatttccgatgccgcatatgctcatgtttctgcttcgctactacagctatacgggcaaggaacaggctttggccggcgtaaccaagacacttgacggcatggcgaacggcggaatttttgaccacatcgggttcggattcgcccgctactcgactgataatgaatggctcgtgccgcattttgagaaaatgctgtatgacaacgcccttctcctgaccgcctatacggaagcctaccaagtcacgggtaatgagcgctacaaacagattgcgatgcagatcgtaacgtttattcagcgggaaatgatacacgaagacggcagctttttctcagctttagacgctgataccgaaggccgtgaggggaaatattacatatggtccaaaaaagaaatcatgaatcttctcggtgatgaactcggcccgctttactgcaaggtgtataacatcacagatcaaggcaattttgaaggcgaaaacatcccgcacctcattttcacgcggcgtgaggccatcctcgaagagaccggcctcaccggacatgaactggccggacgccttgaagaggcaagaataaaattgctggaggcccgtgaaaacagaagctatccgcatacagatgacaaagtgctgacctcatggaacgcgctcatgattgccgggctggcaaaagccgcaaaggtatttcacgaacctgactttctcagcatggcggaaacagcgatccgctttctcgaacggcacctcatgccggacgggcgcgtcatggtccgctatcgcgagggcgaagtgaaaaacaaagggtttgtcgatgattacgcttttctcatctgggcttatcttgaactgtatgaagcgggttttaatccgtcttatctgcagaaagcgaaaacgttatgtacaagcatgctggagctgttctgggatgaacggcacggaggtttcttctttacagggaatgatgccgagacccttcttgtcagggaaaaagaggtttatgacggggccgtgccttccggaaacagcgcggctgccgtacagctgcttcgtctcggccgcctgacgggtgatatatcactgattgaaaaagccgaagcgatgttttccgtgttcaaacgggaaatagaggcctatccgagcagcaacgctttcttcatgcaaagcgtactggcacatacaatgccccaaaacgaaatcgttgttttcggaaggaaagatgacccagacagaaaacgtttcattgaggcgcttcaggagcatttcactcccgcctatacgattctcgccgcagaacatccggaagagcttgccggcatttctgactttgccgcgggttatcaaatgatcgatgggaggacaacggtctacatttgtgagaatttcgcctgccggaggccgacgacggatattgatgaagcgatgaacaccttacaaatcagcagcagagcctaggcggcctgctgcttttcttttttcacaaaacggaacgcgagccatacgaagatgatattgatcaccagagtcgatatgcaatcatatatttcatagccgccggctgctgttgtaaatatcgacggaatgccgccgtacaccgaatgatcctctgtgagaaagataaataaaaacatattattggcagcgtgaccgccaagggacatctccagactgcccgttttaatcgtgataaaggtccagatcatgccaatggtgacatatccgattcccgcccagagagccccattatccatctccggattcccgaaatgaagtgcgccgaataatccgccgataatgactgtcagaaccaccgcatttgccgtcaattttccggcgaactgaagcagaaaaccgcgaaagagaaattcctccgcagaggtttgaatcggcaccaacaagacggccgccgctaacagcagcagaaaacgtgaagcatggaatccctgaagcatgaaacgatccggatgaattgtaaaatcaatcagccccgcgacaaacatcagcacaacatatgtgccgaatccaaagaaaatcctcttccagttcagcgactgatttggtgtgatgatggataaaaaccgccgtttcataatgaaacgaaccgctatccaaatgcccggaatcgctatgaaatagacgatatgctgtaaataaatatccgccagcgggtcacttaatgccccctcatcccaatttatcgtcagtgaaggattgaaagcggacgtgagaaacatataaaacacggtcagtatgcttccgaaaaagaacaaacccacaatgaccaacagagaaaggatatatctcgatacactattttttccctctgcgggccgtacaaacgtattcatatttatgcatcaacttcctttccttcaacattttacaatataaacagaaacagatataggaaatgttatatattttaagaagaaagcgctatgccgtttcctttggctctggttatttacactctgtttttgccaaaaaaagacctttataatgtattcgtcagataaattaacagtattttctgattacaattgcaaagtcagggggttttttatgaaacatcagacattctcaaatgtagcgaaccgattagaccgtctccccatttcgcgtgtgcactatcaagtattaaccgctctcggaatcatctatttttttgatctcgctgatctgtttacgctcagcaacgtggctccggcgctgattgagcattggggcgtgaagctgtccaccattgccgacatcacggccgcatccttcctgggcatgtttttaggcgcgtccatcggcggaaggctgtccgatcggatcggcaggaaaaaagcgctgaattgttttgtccttgtcttttcgatctcatcttttctgaatgcgctggcatgggatattccgtccttaatgattttccgcttcttgaccgggctcggcgtcgcggccgccatgattgtgacgaacagctatttggcggaattttttccatcctccgtacggggaaaatacatctccctttgcgccatgatcgggctaatcggcgttcccgttacaaacgttgtttccgcttttgtcattcctttaggctcatgggggtggcggctcgtattcgtatggggggcggccggactcatttatttcttttttatccgccggcttgaggaatcgccgcgctggcacgaaaatcggggcgcatatgatcaggcaaacgccattatgaaccgtcttgaagcacgtgcagagaaagaaaaaggcccgcttcccgcgccaaaagaggcggcagaagtacatacagtgaagcacgcaggctacttagggctgtttcagggcaggaatttaaagatcaccatcatcctgtcagcggtatggattcttgaaacctttggcttttacggctttgcttcatgggtgcccagcctgctgaaaagcaacggcatcaccatggaaaaaacgctgtggtacaatgtgcttcactctgtcggcgcaccgcttggcgcattgctcggttccatgatatccgagacgttccaaaggaaatggattctggccgcaagcgcctttcttactgccattgccggactgttatacggcatgacgtttattcccgtcatgattattgtgtttggatttgtcgttaacgtcacggaacggatcttcacctcaaacttatacgcctacacatcggaaccgtatcctacggaatatcgctcggccgggagcgggctggcgtatgggctcggccgtttttccaacatattcggctccctgctcgtcggatttattgccgttaagctcggctacatcagcgtctttttgttcatcggcggctgctggcttctatgttccgttttgttaatcctcttcggcccgaaaacaaatgcacagcaaatttaatcaaaaaaacagtgcggaatcactccgcactgttacactgtgatttctatcaaattgccttccccatcctctatcacgctctcataatatccgtcacccgtcacgcgcgggccgcttacaacctgaaatccatcgtttttaaacgtttccgtcaattcattcacccgctccttgctgcctgtagaaaatgcgagatgcgcccatccggtcatattctgtgccggagcttcatcaatgccgccttttttcataagttccagcctgcatccggagtcaaatgaaagaaaatacgatttgaaatcttttttctcattatgataaaggtcattggccttggcgccgaagtatgtctcataaaactctttcatccgttccaaatctttcacccatatcgctgcatgttcaattcgcatatgtccgcctccctttttttctcaatctatttataaagcatgaaacccatttcagctcaagactttttccgctgaaattgatgcataatttgttttttagctgtttcttcgtgaaaaaacaataaaaatgcttcctttccgacccgttccaaatgaagttccagggatggaatattcaatgcccggctgacgctcagatttccctcgccgatgatctccgcgtcccatttctgttctttcgcaaactggtacaagccggcagccacgtcatcactgtgcgcatagatggccgtcggcgccttgtcgaaaccccagaagtgctcacccgcacgctttccgtcgtccatatcatggcatccgaccagaatgcgggtttcatcaagagagccgaaaaccgccttatatgcggttaccttgtcggccgtactcgggcttttttccgcttcccgcacacatgtaaaagcaacgtcttgatgcccgcggtttttcaaatacaaaaagctttctctgtatgctgcctgcctgtcattataagcgcagggaatctcttgatgctgtgtatattcacaagcgacaatgggaccgtattccaggtaaggcacggcggtttcccattcattcgcccgggacgtgacaatcagtccgtcaatctttttcattttcagcagttcgaaatatgtcatctctatagcggggtcatagttggtggggagaagggttgtcacgtaatcatgggcaaacgcttccttcgtgataccgtttacaattttgtcaaagcagggatggtcgctgtacggcaaaatcacgccgattgtattggtctttccgcgaatcagatcaatggcggttcgattaggggtataatccagctccttcatcacttgattcacaagacgccttttctcctcagatacgtacggatgtcggtttaatacgcgtgatacggtggccaccgacacattcgccagtttcgctatctcttttatatttgccatgtgctcctccattttcggtgataaaaaagcagcaagagtggatttctcttactgctatctcatcataaatccaatgtcatttcaacagggcaatggtcagaacccatgatatcggcacaaatggccgcttggctgatccgctgcttcagtctgtctgaaacaatgacgtaatcaagccgccagccgatgtttttctcacgtgcgttcgtcctgtaagaccaccaggaatacgcgccttcctggtcaggatataaatagcggaatgagtcggtaaatcccgcgttcagcagggcgctgaacgcttcccgctcctgctccgagaaaccggcgttcttccggttggctttcggattttttaagtctatctccctgtgtgcgacattcagatcgccgcataagatcacgggcttcttccggtcaagcttctgcagataatccttaaaatcggcttcccattgaagacggtaatcaattcgctctaatccgcgtttggcattcggcgtataacagttgacgacaaacacatgctcaaattcaagcgtgatcacccgtccttcttgatcatggtcgtcaatccccagtccatagaacacgtgcagcggcttttctttcgaaaaaacagccgtgcctgagtagccttttttcaccgcatagttccaataggcgtgatatccttcaagctgtaatgatacttgtccgtcctgtacttttgtttcttgcagacatagaatatcggcttccgtttcctgaacgtaagtattgatatctatctttttcatcacggcacgcaagccgtttacattccaagaaatcagtttcatgtgatccctcctgtccggctcagccggtatttcagtgtttcaatgtttccgccctctaatgccagcagctgctttttcatttctaaaccgcctctgaacccggtcagtttcccgttttttccgatgacgcgatggcacggaaccgtaatcaataccggatttttcccgattgcggcgcccacggctcttacggctgccggtttctgaatcatttctgctatatccgaataggagtatgtctcgccgtacggtatgtccataagcgctttccatacagcaagctgaaattctgtcccgtaaagatccaccggcactgaaaaagctgatctgccattgtcaatgtactcggacagctctgccgtataaggcgccagcttttcatcatcacgtgccaatcggtattgcggcagtgatttttttgcccactgctcaaactcttcaaagcttccataatttgagcctataaagcaaagccccttagatgtggcggctgtataaaggctccaatcattccgtgtgaagagtgtccaatagatcataggctctttactcatattgaacctccctgtcccattttgacggtttttcggtattctgtgggcgaactcccggttctctttttaaaaagagtcgcgaaatgcgctgtgtttggaattccgacagtcagagcgatctccatgactgtcatatcagtatgctttaaaaggtgttccgccttcgacaatcttattttctgtatatacgcaatcggggatattcccctgatttttttaaatgtccgctgtaaatgataggggctgccgtgacacatttcggccagtacgctcagagtcagggattcgtgataatggcggtcaatgtactcaatgatttgagcaatccattcttcatcaggaagacgaagaccgttcggccggcaccttttacagggacgaaaatgtctctcgagcgctgcatcagccgtatcaaacaccagcacgttttctttattcggaactctcgatttacaagaaggccggcagaaaatccccgtcgtttttactgcataataaaatgccccgtcataagaagcatcattgtgtatgattgcgctccacctttcatcagtcaggatatttctgtctgtttccatctcagccaccccctgttcttcagtataaacaaattcattgcttaagtacgcgtttttgaatagaggagcaagataacaaagataggtgtcaggagcacttccatgtttcatgtgaaacatttcggcaggatggagggggattgatataaaaaaagagcaggagcccgcaggctcttgctcttttctttcggcttactcgccagttacgtatggaagtaaagccatttgacgtgcgcgtttgatcgcgatagtcaatttacgttggtatttcgcgtttgttccagttacacggcgaggtaaaattttaccacgctcagaaacaaactttctaagaagatctacatctttgtaatcgatgtgcgtaatgccgttagaagtgaagtaacaaaccttacggcgtttcgcacgaccgcctctgcgtcctcctgccattgtcatttcccacctttctcgttatgaatatagcgataatctattagaacggaagatcatcatccgagatgtcaatcggcttgccgtcgttggcaaatggatcatcattaaagctgttcccttgatttcgtctctggttgttctgatttccgccgaacggattatcattttggcctccgccaaagtattggcctccgccgctgtttccttcgttgtatccgcctgatccagaaccgccgctgtttttaggctcaagaaattgaacactttcagcttggacttctgtcacgaagacacgctgtccctgctggttttcataatttcttgtctggagtcggccgtctacgccggcaaggcttccttttttaagaaagtttgcaacgttttcggcttgtcttctccaagtgacacaattaatgaaatcggcttcacgttctccggactggttcgtgaatgtacgattcacagctagagtaaacgtggcgacagccgcaccgcttggcgtataacgaagctctgggtcttttgtcagtcttccgactaatacaactcggttaagcatatgaaagaccaccttttaacattatatatttcaaattgcttattcttcttctttaacaacgatgtggcgaatgatatcgtcactgatcttagctaaacggtcgaattcagcaaccgctgcagcttcagactgaacgtttaagatttggtagaaaccgtcacggaaatcgttgatttcgtaagcaagacgacgtttaccccaatcttttgttccagtgatctccgctccgttagaagtcaatacgttgttgaaacgctcgataactgccttctttgactcttcgtcaatgttcggacggataatgtacataacttcgtactttttcatctgtttgcacctccttttggtctaagcggccctataatgggcaaggagcaataattctattactcacaagtttatattataccaaagctcttgtccctttacaactgtgtcctatacattaaatcggaaatgaatgacatctccgtcttggactacatattccttaccttccagacgcacttttccggcttctttcgctccggacattccgccgcctgccaaaaggtcttcataagcaaccgtttcagcgcggataaagccgcgttcaaagtcagtgtggatgatacccgcacactcaggagctttcatgccttttctgaatgtccatgcgcgcacttcctgttcgcccgccgtaaagtatgtcgcaaggccgagaagagagtatgacgctttaatcagctgatcaagacctgattcttcgatgccgagctcctcaaggaacatttgcttttcttcgccttccaattcagcaatttcagactcaattttcgcacagacgacgataacttcggcgttttcacccgcggcgtactcccggattttcgcaacatattcattatctgaaggatcagccacttcatcctcgcttacatttgctacataaagcacaggttttgacgtaagcaaatgaagctgcttcacaagcttttgctgttcttccgtaaattcaacggaacgggcaggcttttcttgttcgaaagcttcttttaatttagacagaatgtcaaattcaaaaaccgcttctttgtctttttgcttagcaagcttgctcacacgcgtgatgcgtttttcgactgtctccatgtcggcaagaatcaattcaagattgatcgtttcaatatcgtcaatcggatcgactttccctgacacgtgcgtaatattgtcatcagcgaatgcgcgtacaacgtggcagatcgcatcaacctgacggatatgagaaagaaacttatttccgagtccttcaccttttgatgcgccttttacgatccccgcgatatcagtgaattcaaacgcagtcggcaccgtttttttcgggttcaccaattcagtcagcttttgcagacgttcatccggcacttccacgattcccacgttcggatcaattgtacagaacgggtagttggctgattcggcaccagcctgggtaattgcattaaataacgtcgattttccgacattcggcaaaccgacaattccagcagttaaagccattctttcatctcctctatatcaaaccatcatcgtataaacgtattgtaaacctagagcaattataaggaggttcataggaaaagacaagctgagaaaaaagcatttcccgccctctctctccttagattatccttttttaaccgctaccagacagtcaaaaagcgtacttcccattccattatcggaatttgaatcctttgtgagcatgttgacggagcctccgaatgccgcccacatgccttcatctatattcaccgtcttcggatgagcctgcttcatgattttcaccctgccgcgcagacggccgcggtcattgtacacctctgccgtatctccgtcttgaagtgaaagctcctcggcgatatccggcgacagatccacctgaatctgctgaagcttttcaataaacggcacgtgctgtgaatgattggagcgctgcgggtgaatggacagcagcgtatacggatatttcccggccagtccggcgtcatgataaacagactcctccggcacctccaattgagggaggccgctgtatcctttctcttctgccagtgacgagacgaattcaaattttccgctcggggttaaaaattgaaaatcactccacggaacctgtttgaccggaagcggcatatgtcctttttcttttaattgctcaagggtgattccttctttctccaaagaagagagccccatttttaagaaatcttccgtactgtaatcaaacagctccccgaatccgagacgctttgcgagttccgtccagatccagcggtctgattttgcctctccctgcggttccgcaagcttcttgccatattgaacatagtgatgatacatgctggaataataaatatcttcctcttcgaaaacaacggccgtcggcagcacatagtcacagagcttcgccgtatcggtcatgaccgaatcaatggccactgtgaccggtgttttttcaaatgcttccttcactttttttgtattcggcacctgtgtcagcggattgccgcacgtcacgatgatcatttcaatcggcggatcggctgcattcagcgcctcttcggcttgagtcatcatcgaaaacgttctcgaacttttcttcagatcaggacgggtgagctcggcctttgcaaagctttcaccgacttgcacatttccgaagtttgcgccgccgcctttgataccgacatttccgctcgccgcagctaaagcgtcaatccaccgtatcgtcccgcccccgtttttatatctctgcatcccaagacccataaaagtggaggcgggaccgtcagcatataaatcagcaagatattcaatcacttctaaagacgtttctgttttctcaatgatctcctcaatagaaatcgtctgcagaagcttttctatttcttcaaaaccgaccgaatgcctttgaatgaaatcgaaatcggttctgccggtttggcataatatttttaaaacacccgccgcaagccagccatccatgccgggtttaacggatatataccgatcggcaagcttggcagtcgggttaaaaataggatcaatgaccgtcagtgtcgctccttttttcttcacctgctgcagatgatgatagaggtgcatattcgtccgggacacgtttctgccccatacgatcacatgcttgctgtgataaatatcaagcggtccatgcccgtaagaacgcccgaaatcccagcgctgcgcttcaatgccggaaccccagcaaatgctgcccgcaatctccgtcacaccgccgtatccattgaaaaaacgctggtcgagcgccttcaaaagaccgttattggcgtaatcatgactgtgcagcactgcggcagtgcccaacgtctccttaatcaccgccattttttcagcaatttcatctaacgcctgctcccaggaaatgcggacaaattcgccgtctatcttttttaaaggaaaacgaagccgttccggcgcattcgttttcgcctccagcattctgccacggccgcaaattttcccttccgtaatgggatgattcgggtctccgtctactttcgtcacctttccatcctcaactgtcaccaaaaagccgcagctgtcccagcaattcagcgggcacgctgactgatgcactttgctcatcgggcctcttcctctcctctatatgaaaaagcatgagcgccagcccttatgatgcaggctcctcatgcttgacgagtacttttttcagctttctctcaaaatctcttctcggaatcatgacactgtgggaacaacccgtgcatttaatccgaatatccattcccatccgaatgattttccacctgttttcaccgcaaggatgcggtttcttcatttcaacaatatcattcaggccaaagtctttatccgccaagacccttcacctctctccatagactgctttatttattgtacaaaaaaagacaggataagagcaacggccgcactcaaaatgagcattatacttttttccatctccctaaaatagggtaaagaagaagacataccagcaaataaagacttaaaagcccgtaaatgggatataaaatcgcgatcaaatctgaaaaaccgattgtcgtaaaaggcaccatcacagctaaaagaagagatacgagcgtccatctcggcaatttcacaaatgcaagcatgcggctggacagcccgaacagaccggtcacggttgtcgtatagatggctaaaaaaagcacggcggccatacaaagaaataacggataaggagcgccttcaaggacggcgaaaagaggaatctcatattgtgtaagactgcctgaaagctgtacaagcgtttcattgtaaacaaatgaaatcataccgaaaatcagcccgcttgcaacgcttgcgattttcgcttctcccagtcccttcatatcttttccgattgaagaaagaacagcgacaacagaaaggatgtttaaggacgtgaaggtaatgcttgccggccaattatactggcgggtcaaatctatcgtccacgtgtaatgatgggttgtctgaaaaaagaccaatgcatataacagccccgctacaagaatcggtatcaaaatactattcagagatagtattccttttatatcccaaaagaataaaccgacagtcacaatgcaaagaagaaaaataccgatccaaaatggcagcttgtacatttgcagcgtcacaccgccgccggcaatcataaccatcgtcattgaaaacaaataaaacataataagcacatcatagactttagcaagagccggccccatcagatgctcaagcacaggtaaaaagtgcgttgattgaacccgatagctgatcttcaacacaatataagccgaaatcgtaaacatgactgtaaacaatacaatagccagtccgctttcgacaccgaaaaactgccatatttcctgcccgcttgcatatccagccccaatctggctgcttaatatgagcagcatccacttcatcccggctctccacaccctcatcacctcataaaatttcagataatctccgcatattgctactatattgagtgacaacggcaatcattcatacaaaagggacaaatatggtatgataacgacgattgactattcagaaaaatttacttatgcaaggagctcaaaccatgtacatcaggcgtttaaccgcaaatgatacccagccttattccgatatcaggctcaaagctttaaaagatcacccagacgcatttgccgtcagctacgatgaggagaaagaatggccgtccgaaaaatttaaagccaggcttgaagccgacaatgccatcgtgcttggcgcctttgaaaaagacagactgataggaatcctcaagatctccaagcatccgctgtttaaactaagacacattgcggttatcggttctatgtatatttcccccaaacaccgagggtcaggcgcgggaaaagctttaatgacggaagccatcagccgagcaaaaaagatgaaggacacagaacagctccatctctctgttacctcaacaaatgaacccgcaataaaactctacgctcagttaggatttatcctcttctctacagaaaaaagagcgctgaaattagatcatcagcgatatgttgatgtagatcaaatggtcttatttctttcatgaacttagagaataactgctctgggttcttttttctatcccgctcttttcaaacaaccggcatgctgatcatggcataagcataaaaaaagacagcgctggatatactgtaaacaaccatacatcaccaaaaacaacaatgtaatactcgtatgacatgacaaggaagtgaaccttatgaatcgaaaaggcgggcttttttctcaagaacgggcaaaacaatatgtatctcatacggattcttctgctgcgaatcaaatacaagcgatccttacttcatctttacgtaaagcagccggcagaccgttagtcaccgtgtgtatcggcacagatcggtcgaccggagattcattaggtccgctcgtaggaacaaagttagaaaaaatgaatttaggcagattgcacgtttacggcacgctgtcagatcctgttcacgccgtcaatatgaaagacaagctgaaagatattcaacatctacataaaaatccgtttattatagcggttgatgcttgtttaggccgcgtcaaaagcgtagggtcatttcaaatcggcgatgggccgctgaagcccggagcaggtgttcaaaaagatcttcctgaaatcggtgacgtccatatcaatggaatcgtcaatgtcagcgggtttatggagtattttgtcctgcagaatacgaggcttcatcttgttatgagcatggcaaatgttttagcagaggggttacagctgacagataaatcagaaggccggcaggaacggctcagtccgtttcataagttgacaagacgtatataaaaaaccatctttttttaaaaagatggtttttacgcttctctttcagacaatagttctaggatacgttcaagatcttcatttgagaaaaactcaatctcaatcttcccttttttcttttgtctctttatatttactgttgttccgaaataattttgcaaatacgattcccgctcttttaacacaacatcttgaacaggttcttttttctttgtttcacgtggaacattgttgtttaactgctgaatcagctgctcaagctgacggacgttcagctgttcttcaaccactttcttcacaagcggctcaagcttgtctttatttttcaaaccaagcaaggttctgccgtgtcccatggataacgtaccttctgcaatgaggttctggatgctttccggcagcgtcagcagtcttaaatggttggcaatatgaggcctgcttttcccgagccgtttagcgagctgttcctgggttaaatccaaatgcttcagcagtgagtcatatgccagagcttcttcaagcggtgataagtcttcacgctgaaggttttccaaaagagcgatttcccgcatcagcgattcagataaatcccgcacgatagccggcactgtctctttaccggcaagttttgcggcgcggtaacggcgttcgccggctacaatatcatagcccttcaatgattttctcacgataatgggctgaagaatgccatgctgaatgatagattccttcagttcagctaatgactcatcgtcaaattgttttcttggctgataaggattggggcgtaaatcactgattttaatctcttccactgtctcttcagacaaatcaacctgattaaacaacgcgttaatcccttttccgagcccgcctttagccattcgctgccacttcctttgctaaatctaaatatacttccgcacctctcgaacgcggatcgtataatatgatcggcttgccgtgactcggcgcctcacttaaacggacatttcgaggaataatggtttgatacactttatctctaaagtatttctttacctcttctatcacttgaatgccgagattcgttctggcatcaagcatcgtcagaagcactccttctatcattaaatcggtatttaaatgtttttgcacaagccgaactgtatttaataattgactcaatccttcaagagcgtagtattcgcactgaaccgggataacgactgaatctgaagcggtaagcgcattaatcgttaataacccgagagacggaggacaatcaataatcatgtaatcgtaattttgtttcactgattctaatgctcttttcagcctgacctcccgtgagatcgtcggaaccaattcgatttccgctcccgcaagctggatcgtggccggaatgacatctaagttctctactgaagtcggtttaataatatctgtaacatctgcatcatctactaaaatgtcgtacacacaatgatccacatcggctttttcaatccctaatccgctcgttgcattgccctgcggatcaatatcaacaagaagaacccttttacctatgtaagccaagcaagcccccagattaacagaagtcgtcgtcttcccgactccgcctttttggttcgtaattgctatgatttttcccacgatgtcacctaccttcacatgaacatgtactgtcttgtttctatcttatcaaaaaaagagtaaagcgttttatttttttcataatttgtttatcagcaagtgaaaaaaatgtaaacggaaaagacactttctaatataagttctccgataaagtgacttttttgactgtaaaaagacaattcacgacacaaaaagataaaattttgcatatataatgtatagtgcacaataaatctatcattatctcaaaatagttttttgattaaaataaaaactcccctgctgatcaggagagtttttatttaggtatccgaatggtaagctggatgtactcttcgaattcttcttcttcagtattcagtctgacgccgctgtcttctaccatagacagtgactgacgaatcgtattcatcgcaattcttgtatccctgctgaacgctttgcgtctcggctttggtttctgcttattctgttcaagcattttcaccactctgtcttccgtctgcttgacgtttaagcttttctcaatgatttccgcaagcaatgtaacctgaaactccggctgtttgagcggaatcagtgctcttgcatgacgttccgtaatttttttctccataatcgcatcctggacgggttccgggagctttaacaatcggagcttgttcgcaatcgttgactggccttttcctaagcgctgcgccaaggcttcctgtgttaaatcatgaagttctaacagccttgcgtacgcatgagcttcctcaatggaggacaattcttccctttgcaggttttcaatcaaagcgacagatgctgtttccgtatcagaaaaatctttaataattgcgggaatcttctcccattcaagcgtctgtaccgctctccagcgcctttcacccgcaatgagctcatattgtccttcatcttctgtatgtctgacaacaatcggctgaatgatgccgtgtgtatggatagtcattgctaactctttgattttttcatctgagaaaatggtgcgtggctgaaaacggttgggaacgatagcatgtaccggtatttcgagtatctcttctttgtttgtatcatgctcagctatctccggttcctcttccttctcaccaaacccgaagaaacgagagaatgaatgcttcatgtacctacaccacctttaaaaactgccatttttataattctattttctcatggtttttcctgctgtatcttcatcaattttgcagaaaatatgatggaattgtcacatcaggctgtctaaattacccttcaattggcgatttatttggagtacccggttttctcggatattttttcggagtgcttttcgtcttgcgaatgatcatgatgttccgttcactttcttcaactggaagtgtaaaggaatgaacttgttcaagctctcctcccaatactttaatcgccttttgccccgctttcagctcttcatcagctgctgctgcttttagtgcggcaaatacgccgtttttcttggccagcggcagacaaagctcactcaggaccgacagacgcgccaccgcacgggccgtcacgagatcgaagctttcccgtacgtctttccgctgtccgaatgtctccgctctgtcatggacaaatgtcgtatgctctaattgtagagcatcagagagagtttccaaaaacgtaatccgcttattcagtgaatcgacgatggtgacatgcagatgcgggaagcagattttgatgggcaggcttggaaaaccggcgccggcgccgacatcacaaagagtggtgaccttttcaaaatcaatataaaatgccgccgttatcgaatcataaaaatgcttgagataaacttcctttttctcagtgatggatgtcagattcattttttcgttccattccacgagcatccggtaatacaactcgaattgctccagctggcggtcagaaagggaaatccctttctccgctaaactggatgtaaattcctctatattcatgccgtcatcctttctattcagctaccttggcaatacggccctgctccaggtataccagcaggattgaaatgtctgccggattgacgccggaaatacgggacgcttgagcaactgataaaggacgcacttctttcagcttttgacgggcttcagtagcaattcctttaatggcgtcataatcaatccgatcagggatttttttgttttccattttcttcagcttttccacttgctgcaaggatttttcgatatatccttcatatttcacctgaatttccacttgttccgccacatcttgcggaaccggagaatctgcaggcgcaagttttgtcactgtttcatagttcatttccggacgtttcattaaatctgtgccgcgcactccgtctttcagctcgcttccgccgagtgaacggatatattcctgattctcaggagacggcttgataataacagaccagagacgttttttctctgcctcgatcgccgcttttttcttctcaaacgcttcatagcgctcatcagaaattaagccgatatcgtggccgatttccgtcagacgaagatccgcgttgtcgtgacggagcagcagtctgtattccgcccgtgaagtcagcagacggtacggttcattggttcctttcgttaccaaatcatcaatcaatacaccgatataagcatcggaacggctgaggatcacttcttcttttccaagcgctttgcggcctgcgttgatccctgccataattccttgcccggctgcttcctcataacctgatgtaccgttaatttgaccggctgtgtacaggttagggatttttttcgtctccagtgtaggccagagctgcgtcggtacaatcgcgtcatactcaatcgcgtatccggctctcatcatctgcaccttttccagtcccggaatggtcgccagcatccgctgctgcacgtcctcaggaagactcgtggataaaccttgaacgtatacttcctgcgtatttctgccttccggctcaaggaaaatctgatgacgcggtttatcattaaaccgaacgactttatcttcaatcgaagggcagtatctcggtcccgttcctttaatcataccggaatacattggcgaacgatgcaggttgctgtcgatgatctcatgagtctcaggactcgtgtaagtcagccagcaaggcagctgatcggtaatgtattcaaccgtttcatatgagaaagcgcgcggaaccgggtcccccggctggatttctgttttgctgtaatcaatggaatcgcttgagacacgaggaggcgtacccgttttaaaacggacgagatcaaaaccgagctcctctaagtgctcagaaagtttaatagacggctgctggttattcggaccgcttgagtaagacaaatcaccgagaatgatccgccctcttaaatacgttccggttgtcagcacgaccgtttttgccttatattcagcaccggtttgcgtaatgacaccgcggcactccccgtcttcaatgattaaacgctcggcaatcccttgaagaagtgtcaaattcggtgttttttccagcgtatgcttcatttcgtgctgatattggaatttatccgcctgcgcacgcagcgcccgtacggccggaccttttcctgtattcagcattctcatttgaatatgagttttatctatatttctagccatttctccgccgagcgcgtcaatttcgcggacgacaatccctttcgcggggccgccgacagacggattacatggcataaacgcaaccatatcaagattaatcgtcaaaacaagcgttttggctccctggcgcgcggatgcgagggcagcctcaacaccggcatgcccggcgccgatgacaatcacgtcgtattggcctgcttcataccccatggttttttcctcccttttatttacctaaacaaaattgtgaaaagagctgatcaattaagctttcgtggacggcatcaccgatgatttcgcccagcagttcccagcaccttgtcaaatcaatttggaccatatcaatcggaacatcctgttcaattccgttcagcgcatcatcaatcgcttgctttgcctgatgcagtatcgagatatgacgggtgttgctgacataggtgagatctccgctttcgatcgctcctgtataaaatagcgactgaatcgcttcctctaaatcttgaatgccttcttctttcagcaatgaggtcgtgacgacaggccggcctttcgccagttccttgacgcgctcagcgtcaatcttagcctcaaggtccgtcttattcataatgacaatgacatccattccctcaaccgcttcaaacaatttcacatcttcttcagaaagctcttcgctgtggttaagcacaagcaaaatgagatccgcttccttcagaacctgccgtgaccgttccacaccgattctttcgacgatgtcttctgtctcacggattccggcggtatcgacaagccgaagcggcacgcctcggacattgacatattcctcaatcacatcacgcgtcgttcccggaatatcggttacgatcgccttcgtttcatggacaaggctgttaagcagagaggattttccgacgttcggacggccgatgatcacggtagacagtccctcacgcaaaattttcccctgctcagacgtacggagcagcgcctcgatttctttcttcacgccgcttgccttctccactaaaagctgatgcgtcatttcttcgacgtcatcatattccggataatctatattaacctcaacatgggcaagtgtttctaacaactcatcacgcagacggcggacaagcgcggaaagccgtccttccatctggttcatggcgacattcatggcacggtccgttttggccctgatcagatccatcaccgcttccgcctgtgataggtcaatccgtccgtttaaaaatgcgcgcttcgtaaactcaccgggttctgccagtctcgcaccttctcttaaagcaagctggagcacctgattaactgtcacaatacctccgtgacaattgatttcaatgacatcttcccttgtgaatgttctgggcgctcttaaaacagacaccatgacttcctcaataatccgtcccgtcgtgctgtccgcgatatgcccgtaatgaatggtatgcgattctgccgaactgagcgttttgcctttcggacccttgtacattttgtcggcgatctctacggcttccgggccgctcagccgaacgatcgcgatcgcgccttcacccatcggagttgaaatcgctgcaattgtatccatgctgttcacctctctttatctctgtttccatctatataaaaaattttatttacgccaaaattaaaagataacatagtttggtttgaagtggaagatacgttatccacaaaggcagaaattcatcccttattactttaacttatccacatgtgaataacaattaattttatttcctaaaaccttttttatcaacagcatagaccgaaaaagaaaaaacttaaacgcaaaaaatgcgattctgcttaggaatagagccatttttaccaataaaaaaaccgaagttccgattttacccggacttcggttttctgctatctttatgggaaataacgagatggcggtaccggccttcaccggtagaaaacgttttgatatttggatgctttgacagagcatcatggatgatttttctttcacctgacggcatcggttctaaatgcacatcttttttcgttttcgacacttgcttggccagcctgtttgccagctgatccagaatttctcttcttttccgccgataattctcagcgtcgacaacggcttggcgatactggcctgagccgcggttcaaaacaagctgcgtcaatgtttccagggcattgagtgtttgtcctcttttgccaataagcagcgccgctttttcacctttaatgtgaaaacagactgttttcttgttttcttccgtaacaatctcagaaggcccggcaatggaatggatgatttcttccaaatacactttcgcttcatgaacaggattttttttctcttccagttctacgatcgcattcttttttccgaaaatacccaaaaaccctttgtattcttcttgcaccaccgttatttctacttgatctttcgtcagttgaagttcctgaaggcctgattgaactgcttcttcgacattccgtcccgcagcagtcaccttcttcactttttctttcctcccgctttctgcgtttccggatcgtgtttaatgtcaggtcctttaataaggaatgtctgagcaatcataaacaggtttccgactacccaatacagagaaagcgcgctcgggaagttgatcgcaaatacgataatcatgatcggcataatccataccatcattgccatttgaggattctgagtcggatttccggccatcatcagcttctgctggacaaaagtggccacaccggcaacgataggaagaatatagtaaggatccttctctcctaggtcaaaccataaaaagctgtgctgtgaaatggcttgcgtacgcataatggcgtggtagaatccgatcaaaatcggcatttgaatcaggatcgggaaacatcccgccagcgggtttaccccgtgctttgaaaacagggccatcgtttcctgctgaagcttctgctgcgttttttgatctttagagctgtatttttctctgagcttctgcatttcaggctgcagcgcctgcattgcttttgagcttcgaagctgcttgatcatcagcggcagaatcagcagacgaattaaaatcgtaacgatgatgatcgataaaccatagttatcgcccgtcagtttcgctacgtacgtaataacttctgacaatggatacacaacatatttgtcccagaaatgcggactattcgccgtaatcggctctttcacactcgagcacccggccagcagcacgagcataccgaccatactcagtagtaaccatattctccttttcaagaacgtttcctcctataccaatctttatgaaccttgtatgtattttagcatctttcagtttcaaatggcgttcatttttcgccaaataaaaggaagcgcttttaaaaacgtgaagaaaacaaaatatgagctattttgacgaagatttcttatataatgaggtttttctgaataagtgctgcagactctttttcgtttcttcaaaactgaggtcgccggcgggttttcttgcgataataataaaatctttcggcttgagcagctctttttcctcctgaacagcctgtctgattaaccgcttcacccgattgcgcacgacggcattgccgatttttttactgacagaaagccctacccggagctcttcctgtttcggctgatcaagcgtatacagcacgaactggcggtttgccatagacgttccgcgtttaaacactttttgaaaatcttcatttttctttaaccgatttcgcttcttcactttaattcactccgatattcactcgcagaaacttttatttctatctaaaaaaaacgggccgccggaatactgaagaaatttctccagtaccgggcgacgcatgacatctcactctcttaatgtgaaaaaagaccactgacattattcagtggcctaagctgataatacttttctgcctttgcggcgacggcgtgctaatactagacgaccgttttttgaactcatacggcttctgaagccatgaactttactgcgtttacggttattcggttggaatgttcttttcatttatgacacctccctcga

(The sequence listing continues in the following parts.)
